(19) United States
(12) Patent Application Publication
(10) Pub. No.: US 2021/0213122 A1
(43) Pub. Date: Jul. 15, 2021

(54) IMMUNE CHECKPOINT INHIBITOR CO-EXPRESSION VECTORS

(71) Applicant: Gritstone Oncology, Inc., Emeryville, CA (US)

(72) Inventors: Wade Blair, Emeryville, CA (US); Karin Jooss, Emeryville, CA (US); Leonid Gitlin, Emeryville, CA (US); Ciaran Daniel Scallan, Emeryville, CA (US); Amy Rachel Rappaport, Emeryville, CA (US); Gijsbert Grotenbreg, Emeryville, CA (US)

(73) Assignee: Gritstone Oncology, Inc., Emeryville, CA (US)

(21) Appl. No.: 17/058,113

(22) PCT Filed: May 23, 2019
(86) PCT No.: PCT/US2019/033828

§ 371 Date: Nov. 23, 2020

Related U.S. Application Data
(60) Provisional application No. 62/675,624, filed on May 23, 2018.

(51) Int. Cl. A61K 39/00; C12N 15/86

(52) U.S. Cl. CPC A61K 39/001188; C12N 15/86; A61K 39/001191; A61K 39/0012; A61K 2039/70; A61K 2039/572; A61K 2039/575; A61K 2039/6037; A61K 2039/605; C12N 2710/10343

(57) ABSTRACT

Disclosed herein are vectors that include antigen-encoding nucleic acid sequences and co-express immune modulators. Also disclosed are nucleotides, cells, and methods associated with the vectors including their use as vaccines.

### CROSS REFERENCE TO RELATED APPLICATIONS

[0001] This application is the National Stage entry of International Application No. PCT/US2019/033828, filed May 23, 2029, which application claims the benefit of U.S. Provisional Application No. 62/675,624 filed May 23, 2018, each of which is hereby incorporated in its entirety by reference for all purposes.

### SEQUENCE LISTING

[0002] The instant application contains a Sequence Listing which has been submitted electronically in ASCII format and is hereby incorporated by reference in its entirety. Said ASCII copy, created on Nov. 23, 2020, is named GSO_018_WOUS_Sequence_Listing.txt and is 619,090 bytes in size.

### BACKGROUND

[0003] Therapeutic vaccines based on tumor-specific antigens hold great promise as a next-generation of personalized cancer immunotherapy. ¹⁻³ For example, cancers with a high mutational burden, such as non-small cell lung cancer (NSCLC) and melanoma, are particularly attractive targets of such therapy given the relatively greater likelihood of neoantigen generation. ^{4,5} Early evidence shows that neoantigen-based vaccination can elicit T-cell responses⁶ and that neoantigen targeted cell-therapy can cause tumor regression under certain circumstances in selected patients.⁷

[0004] In addition to the challenges of current neoantigen prediction methods certain challenges also exist with the available vector systems that can be used for neoantigen delivery in humans, many of which are derived from humans. For example, many humans have pre-existing immunity to human viruses as a result of previous natural exposure, and this immunity can be a major obstacle to the use of recombinant human viruses for neoantigen delivery for cancer treatment.

[0005] The use of immune checkpoint inhibitors has shown great promise in the treatment of cancer. However, improved delivery methods, particularly in the case of DNA or RNA based cancer vaccines, are still needed.

### SUMMARY

[0006] Disclosed herein is vector system comprising an antigen cassette, the antigen cassette comprising: (1) at least one antigen-encoding nucleic acid sequence associated with a tumor present within a subject comprising: at least one antigen-encoding nucleic acid sequence, optionally the at least one antigen-encoding nucleic acid sequence comprising an MHC class I antigen-encoding nucleic acid sequence, each comprising: a. an epitope encoding nucleic acid sequence, optionally comprising at least one alteration that makes the encoded peptide sequence distinct from the corresponding peptide sequence encoded by a wild-type nucleic acid sequence, b. optionally a 5′ linker sequence, and c. optionally a 3′ linker sequence; (2) at least one promoter sequence operably linked to at least one antigen-encoding nucleic acid sequence, (3) optionally, at least one MHC class II antigen-encoding nucleic acid sequence; (4) optionally, at least one GPGPG linker sequence (SEQ ID NO:56); (5) optionally, at least one polyadenylation sequence; and the vector further comprising, optionally within the cassette, a nucleic acid sequence encoding at least one immune modulator, optionally wherein the nucleic acid sequence encoding the at least one immune modulator is transcribed on: (1) the same transcript as the at least one antigen-encoding nucleic acid sequence with an internal ribosome entry sequence (RES) sequence separating the sequences encoding the at least one immune modulator and the at least one antigen-encoding nucleic acid sequence, or (2) a different transcript as the at least one antigen-encoding nucleic acid sequence, wherein at least one second promoter sequence is operably linked to the sequences encoding the at least one immune modulator.

[0007] Also disclosed herein is a chimpanzee adenovirus vector comprising: a. a modified ChAdV68 sequence comprising the sequence of SEQ ID NO:1 with an E1 (nt 577 to 3403) deletion and an E3 (nt 27,125-31,825) deletion; b. a CMV promoter sequence; c. an SV40 polyadenylation signal nucleotide sequence; d. a nucleic acid sequence encoding an immune checkpoint inhibitor, and e. an antigen cassette, the antigen cassette comprising: (1) at least one antigen-encoding nucleic acid sequences derived from a tumor present within a subject, the at least one antigen-encoding nucleic acid sequence comprising: at least 10 tumor-specific and subject-specific MHC class I antigen-encoding nucleic acid sequences linearly linked to each other and each comprising: (A) a MHC class I epitope encoding nucleic acid sequence with at least one alteration that makes the encoded peptide sequence distinct from the corresponding peptide sequence encoded by a wild-type nucleic acid sequence, wherein the MHC I epitope encoding nucleic acid sequence encodes a MHC class I epitope 7-15 amino acids in length, (B) a 5′ linker sequence, wherein the 5′ linker sequence encodes a native N-terminal amino acid sequence of the MHC I epitope, and wherein the 5′ linker sequence encodes a peptide that is at least 3 amino acids in length, (C) a 3′ linker sequence, wherein the 3′ linker sequence encodes a native C-terminal acid sequence of the MHC I epitope, and wherein the 3′ linker sequence encodes a peptide that is at least 3 amino acids in length, and wherein each of the MHC class I antigen-encoding nucleic acid sequences encodes a polypeptide that is 25 amino acids in length, and wherein each 3′ end of each MHC class I antigen-encoding nucleic acid sequence is linked to the 5′ end of the following MHC class I antigen-encoding nucleic acid sequence with the exception of the final MHC class I antigen-encoding nucleic acid sequence; and (2) at least two MHC class II antigen-encoding nucleic acid sequences comprising: (A) a PADRE MHC class II sequence (SEQ ID NO:48), (B) a Tetanus toxoid MHC class II sequence (SEQ ID NO:46), (C) a first nucleic acid sequence encoding a GPGPG amino acid linker sequence (SEQ ID NO: 56) linking the PADRE MHC class II sequence and the Tetanus toxoid MHC class II sequence, (D) a second nucleic acid sequence encoding a GPGPG amino acid linker sequence (SEQ ID NO: 56) linking the 5′ end of the at least two MHC class II antigen-encoding nucleic acid sequences to the at least 10 tumor-specific and subject-specific MHC class I neoantigen-encoding nucleic acid sequences, (E) optionally, a third nucleic acid sequence encoding a GPGPG amino acid linker sequence (SEQ ID NO: 56) at the 3′ end of the at least two MHC class II antigen-encoding nucleic acid sequences; and wherein the antigen cassette is inserted within the E1 deletion and the CMV promoter sequence is operably linked to the antigen cassette, and wherein the nucleic acid sequence encoding the checkpoint inhibitor is transcribed: (1) on the same transcript as the at least one antigen-encoding nucleic acid sequence with an internal ribosome entry sequence (IRES) sequence separating the sequences encoding the checkpoint inhibitor and the at least one antigen-encoding nucleic acid sequence, or (2) on a different transcript as the at least one antigen-encoding nucleic acid sequences, optionally wherein a second CMV promoter sequence is operably linked to the sequences encoding the at least one immune modulator, or optionally wherein the at least one immune modulator is inserted within the E3 deletion.

[0008] In some aspects, an ordered sequence of each element of the vector is described in the formula, from 5′ to 3′, comprising:

Pₐ-(L5_{b}-N_{c}-L3_{d})_{X}-(G5ₑ-U_{f})_{Y}-G3_{g}-Aₕ

wherein P comprises the at least one promoter sequence operably linked to at least one of the at least one antigen-encoding nucleic acid sequences, where a=1, N comprises one of the epitope encoding nucleic acid sequence with at least one alteration that makes the encoded peptide sequence distinct from the corresponding peptide sequence encoded by the wild-type nucleic acid sequence, where c=1, L5 comprises the 5′ linker sequence, where b=0 or 1, L3 comprises the 3′ linker sequence, where d=0 or 1, G5 comprises one of the at least one nucleic acid sequences encoding a GPGPG amino acid linker (SEQ ID NO: 56), where e=0 or 1, G3 comprises one of the at least one nucleic acid sequences encoding a GPGPG amino acid linker (SEQ ID NO: 56), where g=0 or 1, U comprises one of the at least one MHC class II antigen-encoding nucleic acid sequence, where f=1, A comprises the at least one polyadenylation sequence, where h=0 or 1, X=2 to 400, where for each X the corresponding N_{c} is an epitope encoding nucleic acid sequence, optionally wherein for each X the corresponding N_{c} is a distinct MHC class I epitope encoding nucleic acid sequence, and Y=0-2, where for each Y the corresponding U_{f} is an antigen-encoding nucleic acid sequence, optionally wherein for each Y the corresponding U_{f} is a distinct MHC class II antigen-encoding nucleic acid sequence. In a particular aspect, b=1, d=1, e=1, g=1, h=1, X=10, Y=2, P is a CMV promoter sequence, each N encodes a MHC class I epitope 7-15 amino acids in length, L5 encodes a native N-terminal amino acid sequence of the MHC I epitope, and wherein the 5′ linker sequence encodes a peptide that is at least 3 amino acids in length, L3 encodes a native C-terminal amino acid sequence of the MHC I epitope, and wherein the 3′ linker sequence encodes a peptide that is at least 3 amino acids in length, U is each of a PADRE class II sequence and a Tetanus toxoid MHC class II sequence, the vector comprises a modified ChAdV68 sequence comprising the sequence of SEQ ID NO:1 with an E1 (nt 577 to 3403) deletion and an E3 (nt 27,125-31,825) deletion and the neoantigen cassette is inserted within the E1 deletion, and each of the MHC class I antigen-encoding nucleic acid sequences encodes a polypeptide that is 25 amino acids in length.

[0009] In some aspects, at least one of the antigen-encoding nucleic acid sequences encodes a polypeptide sequence or portion thereof that is presented by MHC class I on the tumor cell surface. In some aspects, at least 1, 2, or optionally 3 of the antigen-encoding nucleic acid sequences encode polypeptide sequences or portions thereof is presented by MHC class I on the tumor cell surface.

[0010] In some aspects, each antigen-encoding nucleic acid sequence is linked directly to one another. In some aspects, at least one of the at least one antigen-encoding nucleic acid sequences is linked to a distinct antigen-encoding nucleic acid sequence with a nucleic acid sequence encoding a linker. In some aspects, the linker links two MHC class I sequences or an MHC class I sequence to an MHC class II sequence. In some aspects, the linker is selected from the group consisting of: (1) consecutive glycine residues, at least 2, 3, 4, 5, 6, 7, 8, 9, or 10 residues in length (SEQ ID NO: 113); (2) consecutive alanine residues, at least 2, 3, 4, 5, 6, 7, 8, 9, or 10 residues in length (SEQ ID NO: 114); (3) two arginine residues (RR); (4) alanine, alanine, tyrosine (AAY); (5) a consensus sequence at least 2, 3, 4, 5, 6, 7, 8, 9, or 10 amino acid residues in length that is processed efficiently by a mammalian proteasome; and (6) one or more native sequences flanking the antigen derived from the cognate protein of origin and that is at least 2, 3, 4, 5, 6, 7, 8, 9, 10, 11, 12, 13, 14, 15, 16, 17, 18, 19, 20, or 2-20 amino acid residues in length. In some aspects, the linker links two MHC class II sequences or an MHC class II sequence to an MHC class I sequence. In some aspects, the linker comprises the sequence GPGPG (SEQ ID NO: 56).

[0011] In some aspects, at least one of the at least one antigen-encoding nucleic acid sequences is linked, operably or directly, to a separate or contiguous sequence that enhances the expression, stability, cell trafficking, processing and presentation, and/or immunogenicity of the at least one antigen-encoding nucleic acid sequences. In some aspects, the separate or contiguous sequence comprises at least one of: a ubiquitin sequence, a ubiquitin sequence modified to increase proteasome targeting (e.g., the ubiquitin sequence contains a Gly to Ala substitution at position 76), an immunoglobulin signal sequence (e.g., IgK), a major histocompatibility class I sequence, lysosomal-associated membrane protein (LAMP)-1, human dendritic cell lysosomal-associated membrane protein, and a major histocompatibility class II sequence; optionally wherein the ubiquitin sequence modified to increase proteasome targeting is A76.

[0012] In some aspects, at least one of the antigen-encoding nucleic acid sequences encodes a polypeptide sequence or portion thereof that has increased binding affinity to its corresponding MHC allele relative to the translated, corresponding wild-type nucleic acid sequence. In some aspects, at least one of the antigen-encoding nucleic acid sequences encodes a polypeptide sequence or portion thereof that has increased binding stability to its corresponding MHC allele relative to the translated, corresponding wild-type, parental nucleic acid sequence. In some aspects, at least one of the antigen-encoding nucleic acid sequences encodes a polypeptide sequence or portion thereof that has an increased likelihood of presentation on its corresponding MHC allele relative to the translated, corresponding wild-type, parental nucleic acid sequence.

[0013] In some aspects, at least one alteration comprises a point mutation, a frameshift mutation, a non-frameshift mutation, a deletion mutation, an insertion mutation, a splice variant, a genomic rearrangement, or a proteasome-generated spliced antigen.

[0014] In some aspects, the tumor is selected from the group consisting of: lung cancer, melanoma, breast cancer, ovarian cancer, prostate cancer, kidney cancer, gastric cancer, colon cancer, testicular cancer, head and neck cancer, pancreatic cancer, brain cancer, B-cell lymphoma, acute myelogenous leukemia, chronic myelogenous leukemia, chronic lymphocytic leukemia, T cell lymphocytic leukemia, non-small cell lung cancer, and small cell lung cancer.

[0015] In some aspects, expression of each of the at least one antigen-encoding nucleic acid sequences is driven by the at least one promoter.

[0016] In some aspects, the at least one antigen-encoding nucleic acid sequence comprises at least 2, 3, 4, 5, 6, 7, 8, 9, or 10 nucleic acid sequences. In some aspects, the at least one antigen-encoding nucleic acid sequence comprises at least 11, 12, 13, 14, 15, 16, 17, 18, 19, 20 or up to 400 nucleic acid sequences. In some aspects, the at least one antigen-encoding nucleic acid sequence comprises at least 2-400 nucleic acid sequences and wherein at least one of the antigen-encoding nucleic acid sequences encode polypeptide sequences or portions thereof that are presented by MHC I on the tumor cell surface. In some aspects, the at least one antigen-encoding nucleic acid sequence comprises at least 2-400 nucleic acid sequences and wherein, when administered to the subject and translated, at least one of the antigens are presented on antigen presenting cells resulting in an immune response targeting at least one of the antigens on the tumor cell surface. In some aspects, the at least one antigen-encoding nucleic acid sequence comprises at least 2-400 MHC class I and/or class II antigen-encoding nucleic acid sequences, wherein, when administered to the subject and translated, at least one of the MHC class I or class II antigens are presented on antigen presenting cells resulting in an immune response targeting at least one of the antigens on the tumor cell surface, and optionally wherein the expression of each of the at least 2-400 MHC class I or class II antigen-encoding nucleic acid sequences is driven by the at least one promoter.

[0017] In some aspects, each MHC class I antigen-encoding nucleic acid sequence encodes a polypeptide sequence between 8 and 35 amino acids in length, optionally 9-17, 9-25, 8, 9, 10, 11, 12, 13, 14, 15, 16, 17, 18, 19, 20, 21, 22, 23, 24, 25, 26, 27, 28, 29, 30, 31, 32, 33, 34 or 35 amino acids in length.

[0018] In some aspects, at least one MHC class II antigen-encoding nucleic acid sequence is present. In some aspects, at least one MHC class II antigen-encoding nucleic acid sequence is present and comprises at least one MHC class II neoantigen-encoding nucleic acid sequence that comprises at least one alteration that makes the encoded peptide sequence distinct from the corresponding peptide sequence encoded by a wild-type nucleic acid sequence. In some aspects, the at least one MHC class II antigen-encoding nucleic acid sequence is 12-20, 12, 13, 14, 15, 16, 17, 18, 19, 20, or 20-40 amino acids in length. In some aspects, the at least one MHC class II antigen-encoding nucleic acid sequence is present and comprises at least one universal MHC class II antigen-encoding nucleic acid sequence, optionally wherein the at least one universal sequence comprises at least one of Tetanus toxoid and PADRE.

[0019] In some aspects, the at least one promoter sequence is inducible. In some aspects, the at least one promoter sequence is non-inducible. In some aspects, the at least one promoter sequence is a CMV, SV40, EF-1, RSV, PGK, HSA, MCK, or EBV promoter sequence.

[0020] In some aspects, the antigen cassette further comprises at least one poly-adenylation (polyA) sequence operably linked to at least one of the at least one antigen-encoding nucleic acid sequences, optionally wherein the polyA sequence is located 3′ of the at least one antigen-encoding nucleic acid sequence. In some aspects, the polyA sequence comprises an SV40 or Bovine Growth Hormone (BGH) polyA sequence. In some aspects, the antigen cassette further comprises at least one of: an intron sequence, a woodchuck hepatitis virus posttranscriptional regulatory element (WPRE) sequence, an internal ribosome entry sequence (IRES) sequence, or a sequence in the 5′ or 3′ non-coding region known to enhance the nuclear export, stability, or translation efficiency of mRNA that is operably linked to at least one of the at least one antigen-encoding nucleic acid sequences. In some aspects, the antigen cassette further comprises a reporter gene, including but not limited to, green fluorescent protein (GFP), a GFP variant, secreted alkaline phosphatase, luciferase, or a luciferase variant.

[0021] In some aspects, the at least one immune modulator inhibits an immune checkpoint molecule.

[0022] In some aspects, the immune modulator is an anti-CTLA4 antibody or an antigen-binding fragment thereof, an anti-PD-1 antibody or an antigen-binding fragment thereof, an anti-PD-L1 antibody or an antigen-binding fragment thereof, an anti-4-1BB antibody or an antigen-binding fragment thereof, or an anti-OX-40 antibody or an antigen-binding fragment thereof. In some aspects, the antibody or antigen-binding fragment thereof is a Fab fragment, a Fab′ fragment, a single chain Fv (scFv), a single domain antibody (sdAb) either as single specific or multiple specificities linked together (e.g., camelid antibody domains), or full-length single-chain antibody (e.g., full-length IgG with heavy and light chains linked by a flexible linker). In some aspects, the heavy and light chain sequences of the antibody are a contiguous sequence separated by either a self-cleaving sequence such as 2A, optionally wherein the self-cleaving sequence has a Furin cleavage site sequence 5′ of the self-cleaving sequence, or an IRES sequence; or the heavy and light chain sequences of the antibody are linked by a flexible linker such as consecutive glycine residues. In some aspects, the anti-CTLA4 antibody comprises VL CDR1, CDR2, and CDR3 sequences comprising SEQ ID NOs:76-78, respectively, and VH CDR1, CDR2, and CDR3 sequences comprising SEQ ID NOs:79-81, respectively. In some aspects, the anti-CTLA4 antibody comprises VL CDR1, CDR2, and CDR3 sequences comprising SEQ ID NOs:21-23, respectively, and VH CDR1, CDR2, and CDR3 sequences comprising SEQ ID NOs:18-20, respectively.

[0023] In some aspects, the immune modulator is a cytokine. In some aspects, the cytokine is at least one of IL-2, TL-7, IL-12, IL-15, or IL-21 or variants thereof of each.

[0024] In some aspects, the vector is a chimpanzee adenovirus vector. In some aspects, the vector is the chimpanzee adenovirus vector is a ChAdV68 vector. In some aspects, the vector comprises the sequence set forth in SEQ ID NO:1. In some aspects, vector comprises the sequence set forth in SEQ ID NO:1, except that the sequence is fully deleted or functionally deleted in at least one gene selected from the group consisting of the chimpanzee adenovirus E1A, E1B, E2A, E2B, E3, E4, L1, L2, L3, L4, and L5 genes of the sequence set forth in SEQ ID NO: 1, optionally wherein the sequence is fully deleted or functionally deleted in: (1) E1A and E1B; (2) E1A, E1B, and E3; or (3) E1A, E1B, E3, and E4 of the sequence set forth in SEQ ID NO: 1.

[0025] In some aspects, the vector comprises a gene or regulatory sequence obtained from the sequence of SEQ ID NO: 1, optionally wherein the gene is selected from the group consisting of the chimpanzee adenovirus inverted terminal repeat (ITR), E1A, E1B, E2A, E2B, E3, E4, L1, L2, L3, L4, and L5 genes of the sequence set forth in SEQ ID NO: 1.

[0026] In some aspects, the antigen cassette is inserted in the vector at the E1 region, E3 region, and/or any deleted AdV region that allows incorporation of the antigen cassette.

[0027] In some aspects, the vector is generated from one of a first generation, a second generation, or a helper-dependent adenoviral vector.

[0028] In some aspects, the adenovirus vector the vector comprises one or more deletions between base pair number 577 and 3403 or between base pair 456 and 3014, and optionally wherein the vector further comprises one or more deletions between base pair 27,125 and 31,825 or between base pair 27,816 and 31,333 of the sequence set forth in SEQ ID NO:1. In some aspects, the adenovirus vector further comprises one or more deletions between base pair number 3957 and 10346, base pair number 21787 and 23370, and base pair number 33486 and 36193 of the sequence set forth in SEQ ID NO:1.

[0029] In some aspects, the vector comprises +-stranded RNA vector. In some aspects, the +-stranded RNA vector comprises a 5′ 7-methylguanosine (m7g) cap. In some aspects, the +-stranded RNA vectors are produced by in vitro transcription. In some aspects, the vectors are self-replicating within a mammalian cell.

[0030] In some aspects, the vector comprises a vector backbone, wherein the backbone comprises: (i) at least one promoter nucleotide sequence, and (ii) at least one polyadenylation (poly(A)) sequence. In some aspects, the backbone comprises at least one nucleotide sequence of an Aura virus, a Fort Morgan virus, a Venezuelan equine encephalitis virus, a Ross River virus, a Semliki Forest virus, a Sindbis virus, or a Mayaro virus. In some aspects, the backbone comprises at least one nucleotide sequence of a Venezuelan equine encephalitis virus. In some aspects, the backbone comprises at least sequences for nonstructural protein-mediated amplification, a 26S promoter sequence, a poly(A) sequence, a nonstructural protein 1 (nsP1) gene, a nsP2 gene, a nsP3 gene, and a nsP4 gene encoded by the nucleotide sequence of the Aura virus, the Fort Morgan virus, the Venezuelan equine encephalitis virus, the Ross River virus, the Semliki Forest virus, the Sindbis virus, or the Mayaro virus. In some aspects, the backbone comprises at least sequences for nonstructural protein-mediated amplification, a 26S promoter sequence, and a poly(A) sequence encoded by the nucleotide sequence of the Aura virus, the Fort Morgan virus, the Venezuelan equine encephalitis virus, the Ross River virus, the Semliki Forest virus, the Sindbis virus, or the Mayaro virus. In some aspects, sequences for nonstructural protein-mediated amplification are selected from the group consisting of: an alphavirus 5′ UTR, a 51-nt CSE, a 24-nt CSE, a 26S subgenomic promoter sequence, a 19-nt CSE, an alphavirus 3′ UTR, or combinations thereof.

[0031] In some aspects, the backbone does not encode structural virion proteins capsid, E2 and E1. In some aspects, the neoantigen cassette is inserted in place of the structural virion proteins within the nucleotide sequence of the Aura virus, the Fort Morgan virus, the Venezuelan equine encephalitis virus, the Ross River virus, the Semliki Forest virus, the Sindbis virus, or the Mayaro virus.

[0032] In some aspects, the Venezuelan equine encephalitis virus (VEE) comprises the strain TC-83. In some aspects, the Venezuelan equine encephalitis virus comprises the sequence set forth in SEQ ID NO:3 or SEQ ID NO:5 In some aspects, the Venezuelan equine encephalitis virus comprises the sequence of SEQ ID NO:3 or SEQ ID NO:5 further comprising a deletion between base pair 7544 and 11175. In some aspects, the backbone is the sequence set forth in SEQ ID NO:6 or SEQ ID NO:7. In some aspects, the neoantigen cassette is inserted to replace the deletion between base pair 7544 and 11175 set forth in the sequence of SEQ ID NO:3 or SEQ ID NO:5.

[0033] In some aspects, the insertion of the neoantigen cassette provides for transcription of a polycistronic RNA comprising the nsP1-4 genes and the at least one of antigen-encoding nucleic acid sequences, wherein the nsP1-4 genes and the at least one of antigen-encoding nucleic acid sequences are in separate open reading frames.

[0034] In some aspects, the at least one promoter nucleotide sequence is the native 26S promoter nucleotide sequence encoded by the backbone. In some aspects, the at least one promoter nucleotide sequence is an exogenous RNA promoter. In some aspects, the second promoter nucleotide sequence is a 26S promoter nucleotide sequence. In some aspects, the second promoter nucleotide sequence comprises multiple 26S promoter nucleotide sequences, wherein each 26S promoter nucleotide sequence provides for transcription of one or more of the separate open reading frames.

[0035] In some aspects, the vector is an srRNA vector. In some aspects, the srRNA vector is a Venezuelan equine encephalitis virus srRNA vector.

[0036] In some aspects, the at least one antigen-encoding nucleic acid sequences are selected by performing the steps of: obtaining at least one of exome, transcriptome, or whole genome tumor nucleotide sequencing data from the tumor, wherein the tumor nucleotide sequencing data is used to obtain data representing peptide sequences of each of a set of antigens; inputting the peptide sequence of each antigen into a presentation model to generate a set of numerical likelihoods that each of the antigens is presented by one or more of the MHC alleles on the tumor cell surface of the tumor, the set of numerical likelihoods having been identified at least based on received mass spectrometry data; and selecting a subset of the set of antigens based on the set of numerical likelihoods to generate a set of selected antigens which are used to generate the at least one antigen-encoding nucleic acid sequences.

[0037] In some aspects, each of the epitope encoding nucleic acid sequences are selected by performing the steps of: obtaining at least one of exome, transcriptome, or whole genome tumor nucleotide sequencing data from the tumor, wherein the tumor nucleotide sequencing data is used to obtain data representing peptide sequences of each of a set of antigens; inputting the peptide sequence of each antigen into a presentation model to generate a set of numerical likelihoods that each of the antigens is presented by one or more of the MHC alleles on the tumor cell surface of the tumor, the set of numerical likelihoods having been identified at least based on received mass spectrometry data; and selecting a subset of the set of antigens based on the set of numerical likelihoods to generate a set of selected antigens which are used to generate the at least one antigen-encoding nucleic acid sequences.

[0038] In some aspects, a number of the set of selected antigens is 2-20.

[0039] In some aspects, the presentation model represents dependence between: presence of a pair of a particular one of the MHC alleles and a particular amino acid at a particular position of a peptide sequence; and likelihood of presentation on the tumor cell surface, by the particular one of the MHC alleles of the pair, of such a peptide sequence comprising the particular amino acid at the particular position.

[0040] In some aspects, selecting the set of selected antigen comprises selecting antigens that have an increased likelihood of being presented on the tumor cell surface relative to unselected antigens based on the presentation model. In some aspects, selecting the set of selected antigens comprises selecting antigens that have an increased likelihood of being capable of inducing a tumor-specific immune response in the subject relative to unselected antigens based on the presentation model. In some aspects, selecting the set of selected antigens comprises selecting antigens that have an increased likelihood of being capable of being presented to naïve T cells by professional antigen presenting cells (APCs) relative to unselected antigens based on the presentation model, optionally wherein the APC is a dendritic cell (DC). In some aspects, selecting the set of selected antigens comprises selecting antigens that have a decreased likelihood of being subject to inhibition via central or peripheral tolerance relative to unselected antigens based on the presentation model. In some aspects, selecting the set of selected antigens comprises selecting antigens that have a decreased likelihood of being capable of inducing an autoimmune response to normal tissue in the subject relative to unselected antigens based on the presentation model. In some aspects, exome or transcriptome nucleotide sequencing data is obtained by performing sequencing on the tumor tissue. In some aspects, the sequencing is next generation sequencing (NGS) or any massively parallel sequencing approach.

[0041] In some aspects, the antigen cassette comprises junctional epitope sequences formed by adjacent sequences in the antigen cassette. In some aspects, the at least one or each junctional epitope sequence has an affinity of greater than 500 nM for MHC. In some aspects, each junctional epitope sequence is non-self. In some aspects, the antigen cassette does not encode a non-therapeutic MHC class I or class II epitope nucleic acid sequence comprising a translated, wild-type nucleic acid sequence, wherein the non-therapeutic epitope is predicted to be displayed on an MHC allele of the subject. In some aspects, the non-therapeutic predicted MHC class I or class II epitope sequence is a junctional epitope sequence formed by adjacent sequences in the antigen cassette. In some aspects, the prediction in based on presentation likelihoods generated by inputting sequences of the non-therapeutic epitopes into a presentation model. In some aspects, an order of the at least one antigen-encoding nucleic acid sequences in the antigen cassette is determined by a series of steps comprising: 1. generating a set of candidate antigen cassette sequences corresponding to different orders of the at least one antigen-encoding nucleic acid sequences; 2. determining, for each candidate antigen cassette sequence, a presentation score based on presentation of non-therapeutic epitopes in the candidate antigen cassette sequence; and 3. selecting a candidate cassette sequence associated with a presentation score below a predetermined threshold as the antigen cassette sequence for a antigen vaccine.

[0042] Also disclosed herein is a pharmaceutical composition comprising a vector disclosed herein (such as a ChAd-based vector disclosed herein) and a pharmaceutically acceptable carrier. In some aspects, the composition further comprises an adjuvant. In some aspects, the composition further comprises an immune modulator. In some aspects, immune modulator is an anti-CTLA4 antibody or an antigen-binding fragment thereof, an anti-PD-1 antibody or an antigen-binding fragment thereof, an anti-PD-L1 antibody or an antigen-binding fragment thereof, an anti-4-1BB antibody or an antigen-binding fragment thereof, or an anti-OX-40 antibody or an antigen-binding fragment thereof.

[0043] Also disclosed herein is an isolated nucleotide sequence comprising an antigen cassette disclosed herein and at least one promoter disclosed herein. In some aspects, the isolated nucleotide sequence further comprises a ChAd-based gene. In some aspects, the ChAd-based gene is obtained from the sequence of SEQ ID NO: 1, optionally wherein the gene is selected from the group consisting of the chimpanzee adenovirus ITR, E1A, E1B, E2A, E2B, E3, E4, L1, L2, L3, L4, and L5 genes of the sequence set forth in SEQ ID NO: 1, and optionally wherein the nucleotide sequence is cDNA.

[0044] Also disclosed herein is an isolated cell comprising an isolated nucleotide sequence disclosed herein, optionally wherein the cell is a CHO, HEK293 or variants thereof, 911, HeLa, A549, LP-293, PER.C6, or AE1-2a cell.

[0045] Also disclosed herein is a vector comprising an isolated nucleotide sequence disclosed herein.

[0046] Also disclosed herein is a kit comprising a vector disclosed herein and instructions for use.

[0047] Also disclosed herein is a method for treating a subject with cancer, the method comprising administering to the subject a vector disclosed herein or a pharmaceutical composition disclosed herein. In some aspects, the vector or composition is administered intramuscularly (IM), intradermally (ID), or subcutaneously (SC). In some aspects, the method further comprises administering to the subject an immune modulator, optionally wherein the immune modulator is administered before, concurrently with, or after administration of the vector or pharmaceutical composition. In some aspects, the immune modulator is an anti-CTLA4 antibody or an antigen-binding fragment thereof, an anti-PD-1 antibody or an antigen-binding fragment thereof, an anti-PD-L1 antibody or an antigen-binding fragment thereof, an anti-4-1BB antibody or an antigen-binding fragment thereof, or an anti-OX-40 antibody or an antigen-binding fragment thereof. In some aspects, the immune modulator is administered intravenously (IV), intramuscularly (IM), intradermally (ID), or subcutaneously (SC). In some aspects, wherein the subcutaneous administration is near the site of the vector or composition administration or in close proximity to one or more vector or composition draining lymph nodes.

[0048] In some aspects, the method further comprises administering to the subject a second vaccine composition. In some aspects, the second vaccine composition is administered prior to the administration of the vector or the pharmaceutical composition of any of the above vectors or compositions. In some aspects, the second vaccine composition is administered subsequent to the administration of the vector or the pharmaceutical composition of any of the above vectors or compositions. In some aspects, the second vaccine composition is the same as the vector or the pharmaceutical composition of any of the above vectors or compositions. In some aspects, the second vaccine composition is different from the vector or the pharmaceutical composition of any of the above vectors or compositions. In some aspects, the second vaccine composition comprises a chimpanzee adenovirus vector. In some aspects, the chimpanzee adenovirus vector is a ChAdV68 vector. In some aspects, the second vaccine composition comprises an srRNA vector. In some aspects, the srRNA vector is a Venezuelan equine encephalitis virus vector. In some aspects, the chimpanzee adenovirus vector or the srRNA vector comprises a nucleic acid sequence encoding at least one immune modulator. In some aspects, the at least one antigen-encoding nucleic acid sequence encoded by the chimpanzee adenovirus vector or the srRNA vector is the same as the at least one antigen-encoding nucleic acid sequences of any of the above vectors. In some aspects, the nucleic acid sequence encoding the at least one immune modulator encoded by the chimpanzee adenovirus vector or the srRNA vector is the same as the at least one immune modulator of any of the above vectors.

[0049] In some aspects, any of the above compositions further comprise a nanoparticulate delivery vehicle. The nanoparticulate delivery vehicle, in some aspects, may be a lipid nanoparticle (LNP). In some aspects, the LNP comprises ionizable amino lipids. In some aspects, the ionizable amino lipids comprise MC3-like (dilinoleylmethyl-4-dimethylaminobutyrate) molecules. In some aspects, the nanoparticulate delivery vehicle encapsulates the neoantigen expression system.

[0050] In some aspects, any of the above compositions further comprise a plurality of LNPs, wherein the LNPs comprise: the neoantigen expression system; a cationic lipid; a non-cationic lipid; and a conjugated lipid that inhibits aggregation of the LNPs, wherein at least about 95% of the LNPs in the plurality of LNPs either: have a non-lamellar morphology; or are electron-dense.

[0051] In some aspects, the non-cationic lipid is a mixture of (1) a phospholipid and (2) cholesterol or a cholesterol derivative.

[0052] In some aspects, the conjugated lipid that inhibits aggregation of the LNPs is a polyethyleneglycol (PEG)-lipid conjugate. In some aspects, the PEG-lipid conjugate is selected from the group consisting of: a PEG-diacylglycerol (PEG-DAG) conjugate, a PEG dialkyloxypropyl (PEG-DAA) conjugate, a PEG-phospholipid conjugate, a PEG-ceramide (PEG-Cer) conjugate, and a mixture thereof. In some aspects the PEG-DAA conjugate is a member selected from the group consisting of: a PEG-didecyloxypropyl (C₁₀) conjugate, a PEG-dilauryloxypropyl (C₁₂) conjugate, a PEG-dimyristyloxypropyl (C₁₄) conjugate, a PEG-dipalmityloxypropyl (C₁₆) conjugate, a PEG-distearyloxypropyl (C₁₈) conjugate, and a mixture thereof.

[0053] In some aspects, the neoantigen expression system is fully encapsulated in the LNPs.

[0054] In some aspects, the non-lamellar morphology of the LNPs comprises an inverse hexagonal (H_{II}) or cubic phase structure.

[0055] In some aspects, the cationic lipid comprises from about 10 mol % to about 50 mol % of the total lipid present in the LNPs. In some aspects, the cationic lipid comprises from about 20 mol % to about 50 mol % of the total lipid present in the LNPs. In some aspects, the cationic lipid comprises from about 20 mol % to about 40 mol % of the total lipid present in the LNPs.

[0056] In some aspects, the non-cationic lipid comprises from about 10 mol % to about 60 mol % of the total lipid present in the LNPs. In some aspects, the non-cationic lipid comprises from about 20 mol % to about 55 mol % of the total lipid present in the LNPs. In some aspects, the non-cationic lipid comprises from about 25 mol % to about 50 mol % of the total lipid present in the LNPs.

[0057] In some aspects, the conjugated lipid comprises from about 0.5 mol % to about 20 mol % of the total lipid present in the LNPs. In some aspects, the conjugated lipid comprises from about 2 mol % to about 20 mol % of the total lipid present in the LNPs. In some aspects, the conjugated lipid comprises from about 1.5 mol % to about 18 mol % of the total lipid present in the LNPs.

[0058] In some aspects, greater than 95% of the LNPs have a non-lamellar morphology. In some aspects, greater than 95% of the LNPs are electron dense.

[0059] In some aspects, any of the above compositions further comprise a plurality of LNPs, wherein the LNPs comprise: a cationic lipid comprising from 50 mol % to 65 mol % of the total lipid present in the LNPs; a conjugated lipid that inhibits aggregation of LNPs comprising from 0.5 mol % to 2 mol % of the total lipid present in the LNPs; and a non-cationic lipid comprising either: a mixture of a phospholipid and cholesterol or a derivative thereof, wherein the phospholipid comprises from 4 mol % to 10 mol % of the total lipid present in the LNPs and the cholesterol or derivative thereof comprises from 30 mol % to 40 mol % of the total lipid present in the LNPs; a mixture of a phospholipid and cholesterol or a derivative thereof, wherein the phospholipid comprises from 3 mol % to 15 mol % of the total lipid present in the LNPs and the cholesterol or derivative thereof comprises from 30 mol % to 40 mol % of the total lipid present in the LNPs; or up to 49.5 mol % of the total lipid present in the LNPs and comprising a mixture of a phospholipid and cholesterol or a derivative thereof, wherein the cholesterol or derivative thereof comprises from 30 mol % to 40 mol % of the total lipid present in the LNPs.

[0060] In some aspects, any of the above compositions further comprise a plurality of LNPs, wherein the LNPs comprise: a cationic lipid comprising from 50 mol % to 85 mol % of the total lipid present in the LNPs; a conjugated lipid that inhibits aggregation of LNPs comprising from 0.5 mol % to 2 mol % of the total lipid present in the LNPs; and a non-cationic lipid comprising from 13 mol % to 49.5 mol % of the total lipid present in the LNPs.

[0061] In some aspects, the phospholipid comprises dipalmitoylphosphatidylcholine (DPPC), distearoylphosphatidylcholine (DSPC), or a mixture thereof.

[0062] In some aspects, the conjugated lipid comprises a polyethyleneglycol (PEG)-lipid conjugate. In some aspects, the PEG-lipid conjugate comprises a PEG-diacylglycerol (PEG-DAG) conjugate, a PEG-dialkyloxypropyl (PEG-DAA) conjugate, or a mixture thereof. In some aspects, the PEG-DAA conjugate comprises a PEG-dimyristyloxypropyl (PEG-DMA) conjugate, a PEG-distearyloxypropyl (PEG-DSA) conjugate, or a mixture thereof. In some aspects, the PEG portion of the conjugate has an average molecular weight of about 2,000 daltons.

[0063] In some aspects, the conjugated lipid comprises from 1 mol % to 2 mol % of the total lipid present in the LNPs.

[0064] In some aspects, the LNP comprises a compound having a structure of Formula I:

[chemical structure]

or a pharmaceutically acceptable salt, tautomer, prodrug or stereoisomer thereof, wherein: L¹ and L² are each independently —O(C═O)—, —(C═O)O—, —C(═O)—, —S(O)ₓ₋—, —S—S—, —C(═O)S—, —SC(═O)—, —R^{a}C(═O)—, —C(═O) R^{a}—, —R^{a}C(═O) R^{a}—, —OC(═O) R^{a}—, —R^{a}C(═O)O− or a direct bond; G¹ is C₁-C₂ alkylene, —(C═O)—, —O(C═O)—, —SC(═O)—, —R^{a}C(═O)— or a direct bond: —C(═O)—, —(C═O)O—, —C(═O)S—, —C(═O) R^{a}— or a direct bond; G is C₁-C₆ alkylene; R^{a} is H or C₁-C₁₂ alkyl; R^{1a} and R^{1b} are, at each occurrence, independently either: (a) H or C₁-C₁₂ alkyl; or (b) R^{a} is H or C₁-C₁₂ alkyl, and R^{1b} together with the carbon atom to which it is bound is taken together with an adjacent R^{1b} and the carbon atom to which it is bound to form a carbon-carbon double bond; R^{2a} and R^{2b} are, at each occurrence, independently either: (a) H or C₁-C₁₂ alkyl; or (b) R^{2a} is H or C₁-C₁₂ alkyl, and R^{2b} together with the carbon atom to which it is bound is taken together with an adjacent R²_{b} and the carbon atom to which it is bound to form a carbon-carbon double bond; R^{3a} and R^{3b} are, at each occurrence, independently either (a): H or C₁-C₁₂ alkyl; or (b) R^{3a} is H or C₁-C₁₂ alkyl, and R^{3b} together with the carbon atom to which it is bound is taken together with an adjacent R and the carbon atom to which it is bound to form a carbon-carbon double bond; R^{4a} and R^{4b} are, at each occurrence, independently either: (a) H or C1-C12 alkyl; or (b) R^{4a} is H or C1-C12 alkyl, and R^{4b} together with the carbon atom to which it is bound is taken together with an adjacent R^{4b} and the carbon atom to which it is bound to form a carbon-carbon double bond; R⁵ and R⁶ are each independently H or methyl; R⁷ is C4-C20 alkyl; R¹ and R⁹ are each independently C1-C12 alkyl; or R⁸ and R⁹, together with the nitrogen atom to which they are attached, form a 5, 6 or 7-membered heterocyclic ring; a, b, c and d are each independently an integer from 1 to 24; and x is 0, 1 or 2.

[0065] In some aspects, the LNP comprises a compound having a structure of Formula II:

[chemical structure]

or a pharmaceutically acceptable salt, tautomer, prodrug or stereoisomer thereof, wherein: L¹ and L² are each independently —O(C═O)—, —(C═O)O— or a carbon-carbon double bond; R^{a} and R^{1b} are, at each occurrence, independently either (a) H or C₁-C₁₂ alkyl, or (b) R^{a} is H or C₁-C₁₂ alkyl, and R^{1b} together with the carbon atom to which it is bound is taken together with an adjacent R^{1b} and the carbon atom to which it is bound to form a carbon-carbon double bond; R^{2a} and R^{2b} are, at each occurrence, independently either (a) H or C₁-C₁₂ alkyl, or (b) R^{2a} is H or C₁-C₁₂ alkyl, and R^{2b} together with the carbon atom to which it is bound is taken together with an adjacent R²_{b} and the carbon atom to which it is bound to form a carbon-carbon double bond; R^{3a} and R^{3b} are, at each occurrence, independently either (a) H or C₁-C₁₂ alkyl, or (b) R^{3a} is H or C₁-C₁₂ alkyl, and R^{3b} together with the carbon atom to which it is bound is taken together with an adjacent R^{3b} and the carbon atom to which it is bound to form a carbon-carbon double bond; R^{4a} and R^{4b} are, at each occurrence, independently either (a) H or C₁-C₁₂ alkyl, or (b) R^{4a} is H or C₁-C₁₂ alkyl, and R^{4b} together with the carbon atom to which it is bound is taken together with an adjacent R^{4b} and the carbon atom to which it is bound to form a carbon-carbon double bond; R⁵ and R⁶ are each independently methyl or cycloalkyl; R⁷ is, at each occurrence, independently H or C₁-C₁₂ alkyl; R¹ and R⁹ are each independently unsubstituted C₁-C₁₂ alkyl; or R¹ and R⁹, together with the nitrogen atom to which they are attached, form a 5, 6 or 7-membered heterocyclic ring comprising one nitrogen atom; a and d are each independently an integer from 0 to 24; b and c are each independently an integer from 1 to 24; and e is 1 or 2, provided that: at least one of R^{1a}, R^{2a}, R^{3a} or R⁴ is C1-C12 alkyl, or at least one of L¹ or L² is —O(C═O)— or —(C═O)O—; and R^{1a} and R^{1b} are not isopropyl when a is 6 or n-butyl when a is 8.

[0066] In some aspects, any of the above compositions further comprise one or more excipients comprising a neutral lipid, a steroid, and a polymer conjugated lipid. In some aspects, the neutral lipid comprises at least one of 1,2-Distearoyl-sn-glycero-3-phosphocholine (DSPC), 1,2-Dipalmitoyl-sn-glycero-3-phosphocholine (DPPC), 1,2-Dimyristoyl-sn-glycero-3-phosphocholine (DMPC), 1-Palmitoyl-2-oleoyl-sn-glycero-3-phosphocholine (POPC), 1,2-dioleoyl-sn-glycero-3-phosphocholine (DOPC), and 1,2-Dioleoyl-sn-glycero-3-phosphoethanolamine (DOPE). In some aspects, the neutral lipid is DSPC.

[0067] In some aspects, the molar ratio of the compound to the neutral lipid ranges from about 2:1 to about 8:1.

[0068] In some aspects, the steroid is cholesterol. In some aspects, the molar ratio of the compound to cholesterol ranges from about 2:1 to 1:1.

[0069] In some aspects, the polymer conjugated lipid is a pegylated lipid. In some aspects, the molar ratio of the compound to the pegylated lipid ranges from about 100:1 to about 25:1. In some aspects, the pegylated lipid is PEG-DAG, a PEG polyethylene (PEG-PE), a PEG-succinoyl-diacylglycerol (PEG-S-DAG), PEG-cer or a PEG dialkyoxypropylcarbamate. In some aspects, the pegylated lipid has the following structure III:

[chemical structure]

or a pharmaceutically acceptable salt, tautomer or stereoisomer thereof, wherein: R¹⁰ and R¹¹ are each independently a straight or branched, saturated or unsaturated alkyl chain containing from 10 to 30 carbon atoms, wherein the alkyl chain is optionally interrupted by one or more ester bonds; and z has a mean value ranging from 30 to 60. In some aspects, R¹⁰ and R¹¹ are each independently straight, saturated alkyl chains having 12 to 16 carbon atoms. In some aspects, the average z is about 45.

[0070] In some aspects, the LNP self-assembles into non-bilayer structures when mixed with polyanionic nucleic acid. In some aspects, the non-bilayer structures have a diameter between 60 nm and 120 nm. In some aspects, the non-bilayer structures have a diameter of about 70 nm, about 80 nm, about 90 nm, or about 100 nm. In some aspects, wherein the nanoparticulate delivery vehicle has a diameter of about 100 nm.

[0071] Also disclosed herein is a method of manufacturing a vector disclosed herein, the method comprising: obtaining a plasmid sequence comprising the at least one promoter sequence and the antigen cassette; transfecting the plasmid sequence into one or more host cells; and isolating the vector from the one or more host cells.

[0072] In some aspects, isolating comprises: lysing the host cell to obtain a cell lysate comprising the vector; and purifying the vector from the cell lysate and optionally also from media used to culture the host cell.

[0073] In some aspects, the plasmid sequence is generated using one of the following; DNA recombination or bacterial recombination or full genome DNA synthesis or full genome DNA synthesis with amplification of synthesized DNA in bacterial cells. In some aspects, the one or more host cells are at least one of CHO, HEK293 or variants thereof, 911, HeLa, A549, LP-293, PER.C6, and AE1-2a cells. In some aspects, purifying the vector from the cell lysate involves one or more of chromatographic separation, centrifugation, virus precipitation, and filtration.

### BRIEF DESCRIPTION OF THE SEVERAL VIEWS OF THE DRAWINGS

[0074] These and other features, aspects, and advantages of the present invention will become better understood with regard to the following description, and accompanying drawings, where:

[0075] FIG. 1 illustrates development of an in vitro T cell activation assay. Schematic of the assay in which the delivery of a vaccine cassette to antigen presenting cells, leads to expression, processing and MHC-restricted presentation of distinct peptide antigens. Reporter T cells engineered with T cell receptors that match the specific peptide-MHC combination become activated resulting in luciferase expression.

[0076] FIG. 2A illustrates evaluation of linker sequences in short cassettes and shows five class I MHC restricted epitopes (epitopes 1 through 5) concatenated in the same position relative to each other followed by two universal class II MHC epitopes (MHC-II). Various iterations were generated using different linkers. In some cases the T cell epitopes are directly linked to each other. In others, the T cell epitopes are flanked on one or both sides by its natural sequence. In other iterations, the T cell epitopes are linked by the non-natural sequences AAY, RR, and DPP.

[0077] FIG. 2B illustrates evaluation of linker sequences in short cassettes and shows sequence information on the T cell epitopes embedded in the short cassettes. Figure discloses SEQ ID NOS 86-87, 90, 89, 88, and 207-208, respectively, in order of appearance.

[0078] FIG. 3 illustrates evaluation of cellular targeting sequences added to model vaccine cassettes. The targeting cassettes extend the short cassette designs with ubiquitin (Ub), signal peptides (SP) and/or transmembrane (TM) domains, feature next to the five marker human T cell epitopes (epitopes 1 through 5) also two mouse T cell epitopes SIINFEKL (SEQ ID NO: 83) (SII) and SPSYAYHQF (SEQ ID NO: 84) (A5), and use either the non natural linker AAY- or natural linkers flanking the T cell epitopes on both sides (25mer).

[0079] FIG. 4 illustrates in vivo evaluation of linker sequences in short cassettes. A) Experimental design of the in vivo evaluation of vaccine cassettes using HLA-A2 transgenic mice.

[0080] FIG. 5A illustrates in vivo evaluation of the impact of epitope position in long 21-mer cassettes and shows the design of long cassettes entails five marker class I epitopes (epitopes 1 through 5) contained in their 25-mer natural sequence (linker=natural flanking sequences), spaced with additional well-known T cell class I epitopes (epitopes 6 through 21) contained in their 25-mer natural sequence, and two universal class II epitopes (MHC-110, with only the relative position of the class I epitopes varied.

[0081] FIG. 5B illustrates in vivo evaluation of the impact of epitope position in long 21-mer cassettes and shows the sequence information on the T cell epitopes used. Figure discloses SEQ ID NOS 86-87, 90, 89, 88, 209-211, 91, and 212-223, respectively, in order of appearance.

[0082] FIG. 6A illustrates final cassette design for preclinical IND-enabling studies and shows the design of the final cassettes comprises 20 MHC I epitopes contained in their 25-mer natural sequence (linker=natural flanking sequences), composed of 6 non-human primate (NHP) epitopes, 5 human epitopes, 9 murine epitopes, as well as 2 universal MHC class II epitopes.

[0083] FIG. 6B illustrates final cassette design for preclinical IND-enabling studies and shows the sequence information for the T cell epitopes used that are presented on class I MHC of non-human primate, mouse and human origin, as well as sequences of 2 universal MHC class II epitopes PADRE and Tetanus toxoid. Figure discloses SEQ ID NOS 139-144, 83-84, 169, 224, 173-175, 171-172, 88-90, 86-87, 207, and 225, respectively, in order of appearance.

[0084] FIG. 7A illustrates ChAdV68.4WTnt.GFP virus production after transfection. HEK293A cells were transfected with ChAdV68.4WTnt.GFP DNA using the calcium phosphate protocol. Viral replication was observed 10 days after transfection and ChAdV68.4WTnt.GFP viral plaques were visualized using light microscopy (40× magnification).

[0085] FIG. 7B illustrates ChAdV68.4WTnt.GFP virus production after transfection. HEK293A cells were transfected with ChAdV68.4WTnt.GFP DNA using the calcium phosphate protocol. Viral replication was observed 10 days after transfection and ChAdV68.4WTnt.GFP viral plaques were visualized using fluorescent microscopy at 40× magnification.

[0086] FIG. 7C illustrates ChAdV68.4WTnt.GFP virus production after transfection. HEK293A cells were transfected with ChAdV68.4WTnt.GFP DNA using the calcium phosphate protocol. Viral replication was observed 10 days after transfection and ChAdV68.4WTnt.GFP viral plaques were visualized using fluorescent microscopy at 100× magnification.

[0087] FIG. 8A illustrates ChAdV68.5WTnt.GFP virus production after transfection. HEK293A cells were transfected with ChAdV68.5WTnt.GFP DNA using the lipofectamine protocol. Viral replication (plaques) was observed 10 days after transfection. A lysate was made and used to reinfect a T25 flask of 293A cells. ChAdV68.5WTnt.GFP viral plaques were visualized and photographed 3 days later using light microscopy (40× magnification)

[0088] FIG. 8B illustrates ChAdV68.5WTnt.GFP virus production after transfection. HEK293A cells were transfected with ChAdV68.5WTnt.GFP DNA using the lipofectamine protocol. Viral replication (plaques) was observed 10 days after transfection. A lysate was made and used to reinfect a T25 flask of 293A cells. ChAdV68.5WTnt.GFP viral plaques were visualized and photographed 3 days later using fluorescent microscopy at 40× magnification.

[0089] FIG. 8C illustrates ChAdV68.5WTnt.GFP virus production after transfection. HEK293A cells were transfected with ChAdV68.5WTnt.GFP DNA using the lipofectamine protocol. Viral replication (plaques) was observed 10 days after transfection. A lysate was made and used to reinfect a T25 flask of 293A cells. ChAdV68.5WTnt.GFP viral plaques were visualized and photographed 3 days later using fluorescent microscopy at 100× magnification.

[0090] FIG. 9 illustrates the viral particle production scheme.

[0091] FIG. 10 illustrates the alphavirus derived VEE self-replicating RNA (srRNA) vector.

[0092] FIG. 11 illustrates in vivo reporter expression after inoculation of C57BL/6J mice with VEE-Luciferase srRNA. Shown are representative images of luciferase signal following immunization of C57BL/6J mice with VEE-Luciferase srRNA (10 ug per mouse, bilateral intramuscular injection, MC3 encapsulated) at various timepoints.

[0093] FIG. 12A illustrates T-cell responses measured 14 days after immunization with VEE srRNA formulated with MC3 LNP in B16—OVA tumor bearing mice. B16—OVA tumor bearing C57BL/6J mice were injected with 10 ug of VEE-Luciferase srRNA (control), VEE-UbAAY srRNA (Vax), VEE-Luciferase srRNA and anti-CTLA-4 (aCTLA-4) or VEE-UbAAY srRNA and anti-CTLA-4 (Vax+aCTLA-4). In addition, all mice were treated with anti-PD1 mAb starting at day 7. Each group consisted of 8 mice. Mice were sacrificed and spleens and lymph nodes were collected 14 days after immunization. SIINFEKL (SEQ ID NO: 83)-specific T-cell responses were assessed by IFN-gamma ELISPOT and are reported as spot-forming cells (SFC) per 106 splenocytes. Lines represent medians.

[0094] FIG. 12B illustrates T-cell responses measured 14 days after immunization with VEE srRNA formulated with MC3 LNP in B16—OVA tumor bearing mice. B16—OVA tumor bearing C57BL/6J mice were injected with 10 ug of VEE-Luciferase srRNA (control), VEE-UbAAY srRNA (Vax), VEE-Luciferase srRNA and anti-CTLA-4 (aCTLA-4) or VEE-UbAAY srRNA and anti-CTLA-4 (Vax+aCTLA-4). In addition, all mice were treated with anti-PD1 mAb starting at day 7. Each group consisted of 8 mice. Mice were sacrificed and spleens and lymph nodes were collected 14 days after immunization. SIINFEKL (SEQ ID NO: 83)-specific T-cell responses were assessed by MHICI-pentamer staining, reported as pentamer positive cells as a percent of CD8 positive cells. Lines represent medians.

[0095] FIG. 13A illustrates antigen-specific T-cell responses following heterologous prime/boost in B16—OVA tumor bearing mice. B16—OVA tumor bearing C57BL/6J mice were injected with adenovirus expressing GFP (Ad5-GFP) and boosted with VEE-Luciferase srRNA formulated with MC3 LNP (Control) or Ad5-UbAAY and boosted with VEE-UbAAY srRNA (Vax). Both the Control and Vax groups were also treated with an IgG control mAb. A third group was treated with the Ad5-GFP prime/VEE-Luciferase srRNA boost in combination with anti-CTLA-4 (aCTLA-4), while the fourth group was treated with the Ad5-UbAAY prime/VEE-UbAAY boost in combination with anti-CTLA-4 (Vax+aCTLA-4). In addition, all mice were treated with anti-PD-1 mAb starting at day 21. T-cell responses were measured by IFN-gamma ELISPOT. Mice were sacrificed and spleens and lymph nodes collected at 14 days post immunization with adenovirus.

[0096] FIG. 13B illustrates antigen-specific T-cell responses following heterologous prime/boost in B16—OVA tumor bearing mice. B16—OVA tumor bearing C57BL/6J mice were injected with adenovirus expressing GFP (Ad5-GFP) and boosted with VEE-Luciferase srRNA formulated with MC3 LNP (Control) or Ad5-UbAAY and boosted with VEE-UbAAY srRNA (Vax). Both the Control and Vax groups were also treated with an IgG control mAb. A third group was treated with the Ad5-GFP prime/VEE-Luciferase srRNA boost in combination with anti-CTLA-4 (aCTLA-4), while the fourth group was treated with the Ad5-UbAAY prime/VEE-UbAAY boost in combination with anti-CTLA-4 (Vax+aCTLA-4). In addition, all mice were treated with anti-PD-1 mAb starting at day 21. T-cell responses were measured by IFN-gamma ELISPOT. Mice were sacrificed and spleens and lymph nodes collected at 14 days post immunization with adenovirus and 14 days post boost with srRNA (day 28 after prime).

[0097] FIG. 13C illustrates antigen-specific T-cell responses following heterologous prime/boost in B16—OVA tumor bearing mice. B16—OVA tumor bearing C57BL/6J mice were injected with adenovirus expressing GFP (Ad5-GFP) and boosted with VEE-Luciferase srRNA formulated with MC3 LNP (Control) or Ad5-UbAAY and boosted with VEE-UbAAY srRNA (Vax). Both the Control and Vax groups were also treated with an IgG control mAb. A third group was treated with the Ad5-GFP prime/VEE-Luciferase srRNA boost in combination with anti-CTLA-4 (aCTLA-4), while the fourth group was treated with the Ad5-UbAAY prime/VEE-UbAAY boost in combination with anti-CTLA-4 (Vax+aCTLA-4). In addition, all mice were treated with anti-PD-1 mAb starting at day 21. T-cell responses were measured by MHC class I pentamer staining. Mice were sacrificed and spleens and lymph nodes collected at 14 days post immunization with adenovirus.

[0098] FIG. 13D illustrates antigen-specific T-cell responses following heterologous prime/boost in B16—OVA tumor bearing mice. B16—OVA tumor bearing C57BL/6J mice were injected with adenovirus expressing GFP (Ad5-GFP) and boosted with VEE-Luciferase srRNA formulated with MC3 LNP (Control) or Ad5-UbAAY and boosted with VEE-UbAAY srRNA (Vax). Both the Control and Vax groups were also treated with an IgG control mAb. A third group was treated with the Ad5-GFP prime/VEE-Luciferase srRNA boost in combination with anti-CTLA-4 (aCTLA-4), while the fourth group was treated with the Ad5-UbAAY prime/VEE-UbAAY boost in combination with anti-CTLA-4 (Vax+aCTLA-4). In addition, all mice were treated with anti-PD-1 mAb starting at day 21. T-cell responses were measured by MHC class I pentamer staining. Mice were sacrificed and spleens and lymph nodes collected at 14 days post immunization with adenovirus and 14 days post boost with srRNA (day 28 after prime).

[0099] FIG. 14A illustrates antigen-specific T-cell responses following heterologous prime/boost in CT26 (Balb/c) tumor bearing mice. Mice were immunized with Ad5-GFP and boosted 15 days after the adenovirus prime with VEE-Luciferase srRNA formulated with MC3 LNP (Control) or primed with Ad5-UbAAY and boosted with VEE-UbAAY srRNA (Vax). Both the Control and Vax groups were also treated with an IgG control mAb. A separate group was administered the Ad5-GFP/VEE-Luciferase srRNA prime/boost in combination with anti-PD-1 (aPD1), while a fourth group received the Ad5-UbAAY/VEE-UbAAY srRNA prime/boost in combination with an anti-PD-1 mAb (Vax+aPD1). T-cell responses to the AH1 peptide were measured using IFN-gamma ELISPOT. Mice were sacrificed and spleens and lymph nodes collected at 12 days post immunization with adenovirus.

[0100] FIG. 14B illustrates antigen-specific T-cell responses following heterologous prime/boost in CT26 (Balb/c) tumor bearing mice. Mice were immunized with Ad5-GFP and boosted 15 days after the adenovirus prime with VEE-Luciferase srRNA formulated with MC3 LNP (Control) or primed with Ad5-UbAAY and boosted with VEE-UbAAY srRNA (Vax). Both the Control and Vax groups were also treated with an IgG control mAb. A separate group was administered the Ad5-GFP/VEE-Luciferase srRNA prime/boost in combination with anti-PD-1 (aPD1), while a fourth group received the Ad5-UbAAY/VEE-UbAAY srRNA prime/boost in combination with an anti-PD-1 mAb (Vax+aPD1). T-cell responses to the AH1 peptide were measured using IFN-gamma ELISPOT. Mice were sacrificed and spleens and lymph nodes collected at 12 days post immunization with adenovirus and 6 days post boost with srRNA (day 21 after prime).

[0101] FIG. 15 illustrates ChAdV68 eliciting T-Cell responses to mouse tumor antigens in mice. Mice were immunized with ChAdV68.5WTnt.MAG25mer, and T-cell responses to the MHC class I epitope SIINFEKL (SEQ ID NO: 83) (OVA) were measured in C57BL/6J female mice and the MHC class I epitope AH1-A5 measured in Balb/c mice. Mean spot forming cells (SFCs) per 10⁶ splenocytes measured in ELISpot assays presented. Error bars represent standard deviation.

[0102] FIG. 16 illustrates cellular immune responses in a CT26 tumor model following a single immunization with either ChAdV6, ChAdV+anti-PD-1, srRNA, srRNA+anti-PD-1, or anti-PD-1 alone. Antigen-specific IFN-gamma production was measured in splenocytes for 6 mice from each group using ELISpot. Results are presented as spot forming cells (SFC) per 10⁶ splenocytes. Median for each group indicated by horizontal line. P values determined using the Dunnett's multiple comparison test; *** P<0.0001, **P<0.001, *P<0.05. ChAdV=ChAdV68.5WTnt.MAG25mer; srRNA=VEE-MAG25mer srRNA.

[0103] FIG. 17 illustrates CD8 T-Cell responses in a CT26 tumor model following a single immunization with either ChAdV6, ChAdV+anti-PD-1, srRNA, srRNA+anti-PD-1, or anti-PD-1 alone. Antigen-specific IFN-gamma production in CD8 T cells measured using ICS and results presented as antigen-specific CD8 T cells as a percentage of total CD8 T cells. Median for each group indicated by horizontal line. P values determined using the Dunnett's multiple comparison test; *** P<0.0001, **P<0.001, *P<0.05. ChAdV=ChAdV68.5WTnt.MAG25mer; srRNA=VEE-MAG25mer srRNA.

[0104] FIG. 18 illustrates tumor growth in a CT26 tumor model following immunization with a ChAdV/srRNA heterologous prime/boost, a srRNA/ChAdV heterologous prime/boost, or a srRNA/srRNA homologous primer/boost. Also illustrated in a comparison of the prime/boost immunizations with or without administration of anti-PD1 during prime and boost. Tumor volumes measured twice per week and mean tumor volumes presented for the first 21 days of the study. 22-28 mice per group at study initiation. Error bars represent standard error of the mean (SEM). P values determined using the Dunnett's test; *** P<0.0001, **P<0.001, *P<0.05. ChAdV=ChAdV68.5WTnt.MAG25mer; srRNA=VEE-MAG25mer srRNA.

[0105] FIG. 19 illustrates survival in a CT26 tumor model following immunization with a ChAdV/srRNA heterologous prime/boost, a srRNA/ChAdV heterologous prime/boost, or a srRNA/srRNA homologous primer/boost. Also illustrated in a comparison of the prime/boost immunizations with or without administration of anti-PD1 during prime and boost. P values determined using the log-rank test; *** P<0.0001, **P<0.001, *P<0.01. ChAdV=ChAdV68.5WTnt.MAG25mer; srRNA=VEE-MAG25mer srRNA.

[0106] FIG. 20 illustrates antigen-specific cellular immune responses measured using ELISpot. Antigen-specific IFN-gamma production to six different mamu A01 restricted epitopes was measured in PBMCs for the VEE-MAG25mer srRNA-LNP1 (30 pg) (FIG. 20A), VEE-MAG25mer srRNA-LNP1 (100 pg) (FIG. 20B), or VEE-MAG25mer srRNA-LNP2 (100 pg) (FIG. 20C) homologous prime/boost or the ChAdV68.5WTnt.MAG25mer/VEE-MAG25mer srRNA heterologous prime/boost group (FIG. 20D) using ELISpot 1, 2, 3, 4, 5, 6, 8, 9, or 10 weeks after the first boost immunization (6 rhesus macaques per group). Results are presented as mean spot forming cells (SFC) per 10⁶ PBMCs for each epitope in a stacked bar graph format. Values for each animal were normalized to the levels at pre-bleed (week 0).

[0107] FIG. 21 shows antigen-specific cellular immune response measured using ELISpot. Antigen-specific IFN-gamma production to six different mamu A01 restricted epitopes was measured in PBMCs after immunization with the ChAdV68.5WTnt.MAG25mer/VEE-MAG25mer srRNA heterologous prime/boost regimen using ELISpot prior to immunization and 4, 5, 6, 7, 8, 10, 11, 12, 13, 14, 15, 16, 17, 18, 19, 20, 21, 22, 23 or 24 weeks after the initial immunization. Results are presented as mean spot forming cells (SFC) per 10⁶ PBMCs for each epitope (6 rhesus macaques per group) in a stacked bar graph format.

[0108] FIG. 22 shows antigen-specific cellular immune response measured using ELISpot. Antigen-specific IFN-gamma production to six different mamu A01 restricted epitopes was measured in PBMCs after immunization with the VEE-MAG25mer srRNA LNP2 homologous prime/boost regimen using ELISpot prior to immunization and 4, 5, 6, 7, 8, 10, 11, 12, 13, 14, or 15 weeks after the initial immunization. Results are presented as mean spot forming cells (SFC) per 10⁶ PBMCs for each epitope (6 rhesus macaques per group) in a stacked bar graph format.

[0109] FIG. 23 shows antigen-specific cellular immune response measured using ELISpot. Antigen-specific IFN-gamma production to six different mamu A01 restricted epitopes was measured in PBMCs after immunization with the VEE-MAG25mer srRNA LNP1 homologous prime/boost regimen using ELISpot prior to immunization and 4, 5, 6, 7, 8, 10, 11, 12, 13, 14, or 15 weeks after the initial immunization. Results are presented as mean spot forming cells (SFC) per 10⁶ PBMCs for each epitope (6 rhesus macaques per group) in a stacked bar graph format.

[0110] FIG. 24A and FIG. 24B show example peptide spectrums generated from Promega's dynamic range standard. Figure discloses SEQ ID NO: 85.

[0111] FIG. 25 shows the correlation between EDGE score and the probability of detection of candidate shared neoantigen peptides by targeted MS.

[0112] FIG. 26 illustrates an E1/E3 deleted ChAdV68 viral vector was designed with an expression cassette co-expressing a checkpoint inhibitor introduced into the deleted E1 region.

[0113] FIG. 27 shows in vitro mouse anti-CTLA4 clone 9D9 antibody expression post infection of 293A cells.

[0114] FIG. 28A shows a Western Blot demonstrating human anti-CTLA-4 IgG1 antibody (Ipilimumab) antibody expression in chAd68-MAG-IRES-IPI (IPI-MAG) & chAd68-GFP-IRES-IPI (IPI-GFP) infected cells. HEK293A. Cells were infected at an MOI of 1 and cell pellets and supernatants harvested 48h post infection. The anti-CTLA4 antibody was purified from the supernatant by immunoprecipitation with protein-G beads (ThermoFisher). Pellet and immunoprecipitated supernatant were analyzed by SDS-PAGE electrophoresis and Western blotting using a HRP Donkey anti-human IgG antibody and detected by ECL chemiluminescent substrate (ThermoFisher).

[0115] FIG. 28B shows a Western Blot demonstrating human anti-CTLA-4 IgG2 antibody (Tremelimumab) antibody expression in (1) chAd68-MAG-IRES-TREME & chAd68-M2.2, a control virus infected cells. HEK293A. Cells were infected at an MOI of 1 and cell pellets and supernatants harvested 48h post infection. The anti-CTLA4 antibody was purified from the supernatant by immunoprecipitation with protein-G beads (Thermofisher). Pellet and immunoprecipitated supernatant were analyzed by SDS-PAGE electrophoresis and Western blotting using a HRP Donkey anti-human IgG antibody and detected by ECL chemiluminescent substrate (ThermoFisher).

[0116] FIG. 29 illustrates the general organization of the model epitopes from the various species for large antigen cassettes that had either 30 (L), 40 (XL) or 50 (XXL) epitopes.

[0117] FIG. 30 shows ChAd vectors express long cassettes as indicated by the above Western blot using an anti-class II (PADRE) antibody that recognizes a sequence common to all cassettes. HEK293 cells were infected with chAd68 vectors expressing large cassettes (chAd68-50XXL, chAd68-40XL & chAd68-30L) of variable size. Infections were set up at a MOI of 0.2. Twenty-four hours post infection MG132 a proteasome inhibitor was added to a set of the infected wells (indicated by the plus sign). Another set of virus treated wells were not treated with MG132 (indicated by minus sign). Uninfected HEK293 cells (293F) were used as a negative control. Forty-eight hours post infection cell pellets were harvested and analyzed by SDS/PAGE electrophoresis, and immunoblotting using a rabbit anti-Class II PADRE antibody. A HRP anti-rabbit antibody and ECL chemiluminescent substrate was used for detection.

[0118] FIG. 31 shows CD8+ immune responses in chAd68 large cassette immunized mice, detected against AH1 (top) and SIINFEKL (SEQ ID NO: 83) (bottom) by ICS. Data is presented as IFNg+ cells against the model epitope as % of total CD8 cells

[0119] FIG. 32 shows CD8+ responses to LD-AH1+ (top) and Kb-SIINFEKL (SEQ ID NO: 83)+ (bottom) Tetramers post chAd68 large cassette vaccination. Data is presented as % of total CD8 cells reactive against the model Tetramer peptide complex. *p<0.05, **p<0.01 by ANOVA with Tukey's test. All p-values compared to MAG 20-antigen cassette.

[0120] FIG. 33 shows CD8+ immune responses in alphavirus large cassette treated mice, detected against AH1 (top) and SIINFEKL (SEQ ID NO: 83) (bottom) by ICS. Data is presented as IFNg+ cells against the model epitope as % of total CD8 cells. *p<0.05, **p<0.01, ***p<0.001 by ANOVA with Tukey's test. All p-values compared to MAG 20-antigen cassette.

[0121] FIG. 34 illustrates the vaccination strategy used to evaluate immunogenicity of the antigen-cassette containing vectors in rhesus macaques. Triangles indicate chAd68 vaccination (1e12 vp/animal) at weeks 0 & 32. Circles represent alphavirus vaccination at weeks 0, 4, 12,20, 28 & 32. Squares represent administration of an anti-CTLA4 antibody.

[0122] FIG. 35 shows a time course of CD8+ anti-epitope responses in Rhesus Macaques dosed with chAd-MAG alone (Group 4). Mean SFC/1e6 splenocytes is shown.

[0123] FIG. 36 shows a time course of CD8+ anti-epitope responses in Rhesus Macaques dosed with chAd-MAG plus anti-CTLA4 antibody (Ipilimumab) delivered IV (Group 5). Mean SFC/1e6 splenocytes is shown.

[0124] FIG. 37 shows a time course of CD8+ anti-epitope responses in Rhesus Macaques dosed with chAd-MAG plus anti-CTLA4 antibody (Ipilimumab) delivered SC (Group 6). Mean SFC/1e6 splenocytes is shown.

[0125] FIG. 38 shows antigen-specific memory responses generated by ChAdV68/samRNA vaccine protocol measured by ELISpot. Results are presented as individual dot plots, with each dot representing a single animal. Pre-immunization baseline (left panel) and memory response at 18 months post-prime (right panel) are shown.

[0126] FIG. 39 shows memory cell phenotyping of antigen-specific CD8+ T-cells by flow cytometry using combinatorial tetramer staining and CD45RA/CCR7 co-staining.

[0127] FIG. 40 shows the distribution of memory cell types within the sum of the four Mamu-A*01 tetramer+ CD8+ T-cell populations at study month 18. Memory cells were characterized as follows: CD45RA+CCR7+=naïve, CD45RA+CCR7−=effector (Teff), CD45RA−CCR7+=central memory (Tcm), CD45RA−CCR7−=effector memory (Tem).

[0128] FIG. 41 shows antigen-specific T-cell response for immunization with chAd-MAG-CTLA4, chAd-MAG alone, and chAd-MAG with IP delivery of anti-CTLA4 o9D9, at low (1.5e6 IU, left) and high (1.5e7 IU, right) vector doses. Response measured by IFNγ ELISpot and presented as spot-forming cells per 1e6 splenocytes for each mouse (n=8 per group). Bar represents median.

[0129] FIG. 42 shows antigen-specific T-cell response for immunization with chAd-MAG-CTLA4, chAd-MAG alone, and chAd-MAG with IP delivery of anti-CTLA4 o9D9, at low (1.5e6 IU, left) and high (1.5e7 IU, right) vector doses. Response measured by intracellular staining (ICS) and presented as IFNγ cells as a percent of total CD8⁺ cells for each mouse (n=8 per group). Bar represents median.

[0130] FIG. 43 shows anti-CTLA4 antibody levels in the serum of mice immunized with chAd-MAG-CTLA4 or with chAd-MAG plus IP delivery of anti-CTLA4 o9D9. Electrochemiluminescence (ECL), mean and standard deviation for each timepoint and group (n=8 mice per group). Black arrows represent timepoints of anti-CTLA4 administration in groups 3 and 4. Mice were immunized with ChAd-MAG and ChAd-MAG-aCTLA4 at Day 0. Dotted line represents maximum limit of assay. The two groups with systemic (IP) delivery of anti-CTLA4 mAb are both at the maximum limit of the assay at all timepoints measured post-immunization.

[0131] FIG. 44 shows frequency of CD8+ T cells recognizing the CT26 tumor antigen AH1 in CT26 tumor-bearing mice. P values determined using the one-way ANOVA with Tukey's multiple comparisons test; **P<0.001, *P<0.05. ChAdV=ChAdV68.5WTnt.MAG25mer; aCTLA4=anti-CTLA4 antibody, clone 9D9.

### DETAILED DESCRIPTION

### I. Definitions

[0132] In general, terms used in the claims and the specification are intended to be construed as having the plain meaning understood by a person of ordinary skill in the art. Certain terms are defined below to provide additional clarity. In case of conflict between the plain meaning and the provided definitions, the provided definitions are to be used.

[0133] As used herein the term “antigen” is a substance that induces an immune response. An antigen can be a neoantigen. An antigen can be a “shared antigen” that is an antigen found among a specific population, e.g., a specific population of cancer patients.

[0134] As used herein the term “neoantigen” is an antigen that has at least one alteration that makes it distinct from the corresponding wild-type antigen, e.g., via mutation in a tumor cell or post-translational modification specific to a tumor cell. A neoantigen can include a polypeptide sequence or a nucleotide sequence. A mutation can include a frameshift or nonframeshift indel, missense or nonsense substitution, splice site alteration, genomic rearrangement or gene fusion, or any genomic or expression alteration giving rise to a neoORF. A mutations can also include a splice variant. Post-translational modifications specific to a tumor cell can include aberrant phosphorylation. Post-translational modifications specific to a tumor cell can also include a proteasome-generated spliced antigen. See Liepe et al., A large fraction of HLA class I ligands are proteasome-generated spliced peptides; Science. 2016 Oct. 21; 354(6310):354-358. Such shared neoantigens are useful for inducing an immune response in a subject via administration. The subject can be identified for administration through the use of various diagnostic methods, e.g., patient selection methods described further below.

[0135] As used herein the term “tumor antigen” is a antigen present in a subject's tumor cell or tissue but not in the subject's corresponding normal cell or tissue, or derived from a polypeptide known to or have been found to have altered expression in a tumor cell or cancerous tissue in comparison to a normal cell or tissue.

[0136] As used herein the term “antigen-based vaccine” is a vaccine composition based on one or more antigens, e.g., a plurality of antigens. The vaccines can be nucleotide-based (e.g., virally based, RNA based, or DNA based), protein-based (e.g., peptide based), or a combination thereof.

[0137] As used herein the term “candidate antigen” is a mutation or other aberration giving rise to a sequence that may represent a antigen.

[0138] As used herein the term “coding region” is the portion(s) of a gene that encode protein.

[0139] As used herein the term “coding mutation” is a mutation occurring in a coding region.

[0140] As used herein the term “ORF” means open reading frame.

[0141] As used herein the term “NEO-ORF” is a tumor-specific ORF arising from a mutation or other aberration such as splicing.

[0142] As used herein the term “missense mutation” is a mutation causing a substitution from one amino acid to another.

[0143] As used herein the term “nonsense mutation” is a mutation causing a substitution from an amino acid to a stop codon or causing removal of a canonical start codon.

[0144] As used herein the term “frameshift mutation” is a mutation causing a change in the frame of the protein.

[0145] As used herein the term “indel” is an insertion or deletion of one or more nucleic acids.

[0146] As used herein, the term percent “identity,” in the context of two or more nucleic acid or polypeptide sequences, refer to two or more sequences or subsequences that have a specified percentage of nucleotides or amino acid residues that are the same, when compared and aligned for maximum correspondence, as measured using one of the sequence comparison algorithms described below (e.g., BLASTP and BLASTN or other algorithms available to persons of skill) or by visual inspection. Depending on the application, the percent “identity” can exist over a region of the sequence being compared, e.g., over a functional domain, or, alternatively, exist over the full length of the two sequences to be compared.

[0147] For sequence comparison, typically one sequence acts as a reference sequence to which test sequences are compared. When using a sequence comparison algorithm, test and reference sequences are input into a computer, subsequence coordinates are designated, if necessary, and sequence algorithm program parameters are designated. The sequence comparison algorithm then calculates the percent sequence identity for the test sequence(s) relative to the reference sequence, based on the designated program parameters. Alternatively, sequence similarity or dissimilarity can be established by the combined presence or absence of particular nucleotides, or, for translated sequences, amino acids at selected sequence positions (e.g., sequence motifs).

[0148] Optimal alignment of sequences for comparison can be conducted, e.g., by the local homology algorithm of Smith & Waterman, Adv. Appl. Math. 2:482 (1981), by the homology alignment algorithm of Needleman & Wunsch, J. Mol. Biol. 48:443 (1970), by the search for similarity method of Pearson & Lipman, Proc. Nat'l. Acad. Sci. USA 85:2444 (1988), by computerized implementations of these algorithms (GAP, BESTFIT, FASTA, and TFASTA in the Wisconsin Genetics Software Package, Genetics Computer Group, 575 Science Dr., Madison, Wis.), or by visual inspection (see generally Ausubel et al., infra).

[0149] One example of an algorithm that is suitable for determining percent sequence identity and sequence similarity is the BLAST algorithm, which is described in Altschul et al., J. Mol. Biol. 215:403-410 (1990). Software for performing BLAST analyses is publicly available through the National Center for Biotechnology Information.

[0150] As used herein the term “non-stop or read-through” is a mutation causing the removal of the natural stop codon.

[0151] As used herein the term “epitope” is the specific portion of an antigen typically bound by an antibody or T cell receptor.

[0152] As used herein the term “immunogenic” is the ability to elicit an immune response, e.g., via T cells, B cells, or both.

[0153] As used herein the term “HLA binding affinity” “MHIC binding affinity” means affinity of binding between a specific antigen and a specific MHIC allele.

[0154] As used herein the term “bait” is a nucleic acid probe used to enrich a specific sequence of DNA or RNA from a sample.

[0155] As used herein the term “variant” is a difference between a subject's nucleic acids and the reference human genome used as a control.

[0156] As used herein the term “variant call” is an algorithmic determination of the presence of a variant, typically from sequencing.

[0157] As used herein the term “polymorphism” is a germline variant, i.e., a variant found in all DNA-bearing cells of an individual.

[0158] As used herein the term “somatic variant” is a variant arising in non-germline cells of an individual.

[0159] As used herein the term “allele” is a version of a gene or a version of a genetic sequence or a version of a protein.

[0160] As used herein the term “HLA type” is the complement of HLA gene alleles.

[0161] As used herein the term “nonsense-mediated decay” or “NMD” is a degradation of an mRNA by a cell due to a premature stop codon.

[0162] As used herein the term “truncal mutation” is a mutation originating early in the development of a tumor and present in a substantial portion of the tumor's cells.

[0163] As used herein the term “subclonal mutation” is a mutation originating later in the development of a tumor and present in only a subset of the tumor's cells.

[0164] As used herein the term “exome” is a subset of the genome that codes for proteins. An exome can be the collective exons of a genome.

[0165] As used herein the term “logistic regression” is a regression model for binary data from statistics where the logit of the probability that the dependent variable is equal to one is modeled as a linear function of the dependent variables.

[0166] As used herein the term “neural network” is a machine learning model for classification or regression consisting of multiple layers of linear transformations followed by element-wise nonlinearities typically trained via stochastic gradient descent and back-propagation.

[0167] As used herein the term “proteome” is the set of all proteins expressed and/or translated by a cell, group of cells, or individual.

[0168] As used herein the term “peptidome” is the set of all peptides presented by MHC-I or MHC-II on the cell surface. The peptidome may refer to a property of a cell or a collection of cells (e.g., the tumor peptidome, meaning the union of the peptidomes of all cells that comprise the tumor).

[0169] As used herein the term “ELISPOT” means Enzyme-linked immunosorbent spot assay—which is a common method for monitoring immune responses in humans and animals.

[0170] As used herein the term “dextramers” is a dextran-based peptide-MHC multimers used for antigen-specific T-cell staining in flow cytometry.

[0171] As used herein the term “tolerance or immune tolerance” is a state of immune non-responsiveness to one or more antigens, e.g. self-antigens.

[0172] As used herein the term “central tolerance” is a tolerance affected in the thymus, either by deleting self-reactive T-cell clones or by promoting self-reactive T-cell clones to differentiate into immunosuppressive regulatory T-cells (Tregs).

[0173] As used herein the term “peripheral tolerance” is a tolerance affected in the periphery by downregulating or anergizing self-reactive T-cells that survive central tolerance or promoting these T cells to differentiate into Tregs.

[0174] The term “sample” can include a single cell or multiple cells or fragments of cells or an aliquot of body fluid, taken from a subject, by means including venipuncture, excretion, ejaculation, massage, biopsy, needle aspirate, lavage sample, scraping, surgical incision, or intervention or other means known in the art.

[0175] The term “subject” encompasses a cell, tissue, or organism, human or non-human, whether in vivo, ex vivo, or in vitro, male or female. The term subject is inclusive of mammals including humans.

[0176] The term “mammal” encompasses both humans and non-humans and includes but is not limited to humans, non-human primates, canines, felines, murines, bovines, equines, and porcines.

[0177] The term “clinical factor” refers to a measure of a condition of a subject, e.g., disease activity or severity. “Clinical factor” encompasses all markers of a subject's health status, including non-sample markers, and/or other characteristics of a subject, such as, without limitation, age and gender. A clinical factor can be a score, a value, or a set of values that can be obtained from evaluation of a sample (or population of samples) from a subject or a subject under a determined condition. A clinical factor can also be predicted by markers and/or other parameters such as gene expression surrogates. Clinical factors can include tumor type, tumor sub-type, and smoking history.

[0178] The term “antigen-encoding nucleic acid sequences derived from a tumor” refers to nucleic acid sequences directly extracted from the tumor, e.g. via RT-PCR; or sequence data obtained by sequencing the tumor and then synthesizing the nucleic acid sequences using the sequencing data, e.g., via various synthetic or PCR-based methods known in the art.

[0179] The term “alphavirus” refers to members of the family Togaviridae, and are positive-sense single-stranded RNA viruses. Alphaviruses are typically classified as either Old World, such as Sindbis, Ross River, Mayaro, Chikungunya, and Semliki Forest viruses, or New World, such as eastern equine encephalitis, Aura, Fort Morgan, or Venezuelan equine encephalitis and its derivative strain TC-83. Alphaviruses are typically self-replicating RNA viruses.

[0180] The term “alphavirus backbone” refers to minimal sequence(s) of an alphavirus that allow for self-replication of the viral genome. Minimal sequences can include conserved sequences for nonstructural protein-mediated amplification, a nonstructural protein 1 (nsP1) gene, a nsP2 gene, a nsP3 gene, a nsP4 gene, and a polyA sequence, as well as sequences for expression of subgenomic viral RNA including a 26S promoter element.

[0181] The term “sequences for nonstructural protein-mediated amplification” includes alphavirus conserved sequence elements (CSE) well known to those in the art. CSEs include, but are not limited to, an alphavirus 5′ UTR, a 51-nt CSE, a 24-nt CSE, or other 26S subgenomic promoter sequence, a 19-nt CSE, and an alphavirus 3′ UTR.

[0182] The term “RNA polymerase” includes polymerases that catalyze the production of RNA polynucleotides from a DNA template. RNA polymerases include, but are not limited to, bacteriophage derived polymerases including T3, T7, and SP6.

[0183] The term “lipid” includes hydrophobic and/or amphiphilic molecules. Lipids can be cationic, anionic, or neutral. Lipids can be synthetic or naturally derived, and in some instances biodegradable. Lipids can include cholesterol, phospholipids, lipid conjugates including, but not limited to, polyethyleneglycol (PEG) conjugates (PEGylated lipids), waxes, oils, glycerides, fats, and fat-soluble vitamins. Lipids can also include dilinoleylmethyl-4-dimethylaminobutyrate (MC3) and MC3-like molecules.

[0184] The term “lipid nanoparticle” or “LNP” includes vesicle like structures formed using a lipid containing membrane surrounding an aqueous interior, also referred to as liposomes. Lipid nanoparticles includes lipid-based compositions with a solid lipid core stabilized by a surfactant. The core lipids can be fatty acids, acylglycerols, waxes, and mixtures of these surfactants. Biological membrane lipids such as phospholipids, sphingomyelins, bile salts (sodium taurocholate), and sterols (cholesterol) can be utilized as stabilizers. Lipid nanoparticles can be formed using defined ratios of different lipid molecules, including, but not limited to, defined ratios of one or more cationic, anionic, or neutral lipids. Lipid nanoparticles can encapsulate molecules within an outer-membrane shell and subsequently can be contacted with target cells to deliver the encapsulated molecules to the host cell cytosol. Lipid nanoparticles can be modified or functionalized with non-lipid molecules, including on their surface. Lipid nanoparticles can be single-layered (unilamellar) or multi-layered (multilamellar). Lipid nanoparticles can be complexed with nucleic acid. Unilamellar lipid nanoparticles can be complexed with nucleic acid, wherein the nucleic acid is in the aqueous interior. Multilamellar lipid nanoparticles can be complexed with nucleic acid, wherein the nucleic acid is in the aqueous interior, or to form or sandwiched between

[0185] Abbreviations: MHC: major histocompatibility complex; HLA: human leukocyte antigen, or the human MHC gene locus; NGS: next-generation sequencing; PPV: positive predictive value; TSNA: tumor-specific neoantigen; FFPE: formalin-fixed, paraffin-embedded; NMD: nonsense-mediated decay; NSCLC: non-small-cell lung cancer; DC: dendritic cell.

[0186] It should be noted that, as used in the specification and the appended claims, the singular forms “a,” “an,” and “the” include plural referents unless the context clearly dictates otherwise.

[0187] Unless specifically stated or otherwise apparent from context, as used herein the term “about” is understood as within a range of normal tolerance in the art, for example within 2 standard deviations of the mean. About can be understood as within 10%, 9%, 8%, 7%, 6%, 5%, 4%, 3%, 2%, 1%, 0.5%, 0.1%, 0.05%, or 0.01% of the stated value. Unless otherwise clear from context, all numerical values provided herein are modified by the term about.

[0188] Any terms not directly defined herein shall be understood to have the meanings commonly associated with them as understood within the art of the invention. Certain terms are discussed herein to provide additional guidance to the practitioner in describing the compositions, devices, methods and the like of aspects of the invention, and how to make or use them. It will be appreciated that the same thing may be said in more than one way. Consequently, alternative language and synonyms may be used for any one or more of the terms discussed herein. No significance is to be placed upon whether or not a term is elaborated or discussed herein. Some synonyms or substitutable methods, materials and the like are provided. Recital of one or a few synonyms or equivalents does not exclude use of other synonyms or equivalents, unless it is explicitly stated. Use of examples, including examples of terms, is for illustrative purposes only and does not limit the scope and meaning of the aspects of the invention herein.

[0189] All references, issued patents and patent applications cited within the body of the specification are hereby incorporated by reference in their entirety, for all purposes.

### II. Methods of Identifying Antigens

[0190] Methods for identifying shared antigens (e.g., neoantigens) include identifying antigens from a tumor of a subject that are likely to be presented on the cell surface of the tumor or immune cells, including professional antigen presenting cells such as dendritic cells, and/or are likely to be immunogenic. As an example, one such method may comprise the steps of: obtaining at least one of exome, transcriptome or whole genome tumor nucleotide sequencing and/or expression data from the tumor cell of the subject, wherein the tumor nucleotide sequencing and/or expression data is used to obtain data representing peptide sequences of each of a set of antigens (e.g., in the case of neoantigens wherein the peptide sequence of each neoantigen comprises at least one alteration that makes it distinct from the corresponding wild-type peptide sequence or in cases of shared antigens without a mutation where peptides are derived from any polypeptide known to or have been found to have altered expression in a tumor cell or cancerous tissue in comparison to a normal cell or tissue); inputting the peptide sequence of each antigen into one or more presentation models to generate a set of numerical likelihoods that each of the antigens is presented by one or more MHC alleles on the tumor cell surface of the tumor cell of the subject or cells present in the tumor, the set of numerical likelihoods having been identified at least based on received mass spectrometry data; and selecting a subset of the set of antigens based on the set of numerical likelihoods to generate a set of selected antigens.

[0191] The presentation model can comprise a statistical regression or a machine learning (e.g., deep learning) model trained on a set of reference data (also referred to as a training data set) comprising a set of corresponding labels, wherein the set of reference data is obtained from each of a plurality of distinct subjects where optionally some subjects can have a tumor, and wherein the set of reference data comprises at least one of: data representing exome nucleotide sequences from tumor tissue, data representing exome nucleotide sequences from normal tissue, data representing transcriptome nucleotide sequences from tumor tissue, data representing proteome sequences from tumor tissue, and data representing MHC peptidome sequences from tumor tissue, and data representing MHC peptidome sequences from normal tissue. The reference data can further comprise mass spectrometry data, sequencing data, RNA sequencing data, expression profiling data, and proteomics data for single-allele cell lines engineered to express a predetermined MHC allele that are subsequently exposed to synthetic protein, normal and tumor human cell lines, and fresh and frozen primary samples, and T cell assays (e.g., ELISPOT). In certain aspects, the set of reference data includes each form of reference data.

[0192] The presentation model can comprise a set of features derived at least in part from the set of reference data, and wherein the set of features comprises at least one of allele dependent-features and allele-independent features. In certain aspects each feature is included.

[0193] Methods for identifying shared antigens also include generating an output for constructing a personalized cancer vaccine by identifying one or more antigens from one or more tumor cells of a subject that are likely to be presented on a surface of the tumor cells. As an example, one such method may comprise the steps of: obtaining at least one of exome, transcriptome, or whole genome nucleotide sequencing and/or expression data from the tumor cells and normal cells of the subject, wherein the nucleotide sequencing and/or expression data is used to obtain data representing peptide sequences of each of a set of antigens identified by comparing the nucleotide sequencing and/or expression data from the tumor cells and the nucleotide sequencing and/or expression data from the normal cells (e.g., in the case of neoantigens wherein the peptide sequence of each neoantigen comprises at least one alteration that makes it distinct from the corresponding wild-type peptide sequence or in cases of shared antigens without a mutation where peptides are derived from any polypeptide known to or have been found to have altered expression in a tumor cell or cancerous tissue in comparison to a normal cell or tissue), peptide sequence identified from the normal cells of the subject; encoding the peptide sequences of each of the antigens into a corresponding numerical vector, each numerical vector including information regarding a plurality of amino acids that make up the peptide sequence and a set of positions of the amino acids in the peptide sequence; inputting the numerical vectors, using a computer processor, into a deep learning presentation model to generate a set of presentation likelihoods for the set of antigens, each presentation likelihood in the set representing the likelihood that a corresponding antigen is presented by one or more class II MHC alleles on the surface of the tumor cells of the subject, the deep learning presentation model; selecting a subset of the set of antigens based on the set of presentation likelihoods to generate a set of selected antigens; and generating the output for constructing the personalized cancer vaccine based on the set of selected antigens.

[0194] Specific methods for identifying antigens, including neoantigens, are known to those skilled in the art, for example the methods described in more detail in international patent application publications WO/2017/106638, WO/2018/195357, and WO/2018/208856, each herein incorporated by reference, in their entirety, for all purposes.

[0195] A method of treating a subject having a tumor is disclosed herein, comprising performing the steps of any of the antigen identification methods described herein, and further comprising obtaining a tumor vaccine comprising the set of selected antigens, and administering the tumor vaccine to the subject.

[0196] A method disclosed herein can also include identifying one or more T cells that are antigen-specific for at least one of the antigens in the subset. In some embodiments, the identification comprises co-culturing the one or more T cells with one or more of the antigens in the subset under conditions that expand the one or more antigen-specific T cells. In further embodiments, the identification comprises contacting the one or more T cells with a tetramer comprising one or more of the antigens in the subset under conditions that allow binding between the T cell and the tetramer. In even further embodiments, the method disclosed herein can also include identifying one or more T cell receptors (TCR) of the one or more identified T cells. In certain embodiments, identifying the one or more T cell receptors comprises sequencing the T cell receptor sequences of the one or more identified T cells. The method disclosed herein can further comprise genetically engineering a plurality of T cells to express at least one of the one or more identified T cell receptors; culturing the plurality of T cells under conditions that expand the plurality of T cells; and infusing the expanded T cells into the subject. In some embodiments, genetically engineering the plurality of T cells to express at least one of the one or more identified T cell receptors comprises cloning the T cell receptor sequences of the one or more identified T cells into an expression vector; and transfecting each of the plurality of T cells with the expression vector. In some embodiments, the method disclosed herein further comprises culturing the one or more identified T cells under conditions that expand the one or more identified T cells; and infusing the expanded T cells into the subject.

[0197] Also disclosed herein is an isolated T cell that is antigen-specific for at least one selected antigen in the subset.

[0198] Also disclosed herein is a methods for manufacturing a tumor vaccine, comprising the steps of: obtaining at least one of exome, transcriptome or whole genome tumor nucleotide sequencing and/or expression data from the tumor cell of the subject, wherein the tumor nucleotide sequencing and/or expression data is used to obtain data representing peptide sequences of each of a set of antigens (e.g., in the case of neoantigens wherein the peptide sequence of each neoantigen comprises at least one alteration that makes it distinct from the corresponding wild-type peptide sequence or in cases of shared antigens without a mutation where peptides are derived from any polypeptide known to or have been found to have altered expression in a tumor cell or cancerous tissue in comparison to a normal cell or tissue); inputting the peptide sequence of each antigen into one or more presentation models to generate a set of numerical likelihoods that each of the antigens is presented by one or more MHC alleles on the tumor cell surface of the tumor cell of the subject, the set of numerical likelihoods having been identified at least based on received mass spectrometry data; and selecting a subset of the set of antigens based on the set of numerical likelihoods to generate a set of selected antigens; and producing or having produced a tumor vaccine comprising the set of selected antigens.

[0199] Also disclosed herein is a tumor vaccine including a set of selected antigens selected by performing the method comprising the steps of: obtaining at least one of exome, transcriptome or whole genome tumor nucleotide sequencing and/or expression data from the tumor cell of the subject, wherein the tumor nucleotide sequencing and/or expression data is used to obtain data representing peptide sequences of each of a set of antigens, and wherein the peptide sequence of each antigen (e.g., in the case of neoantigens wherein the peptide sequence of each neoantigen comprises at least one alteration that makes it distinct from the corresponding wild-type peptide sequence or in other cases of shared antigens without a mutation where peptides are derived from any polypeptide known to or have been found to have altered expression in a tumor cell or cancerous tissue in comparison to a normal cell or tissue); inputting the peptide sequence of each antigen into one or more presentation models to generate a set of numerical likelihoods that each of the antigens is presented by one or more MHC alleles on the tumor cell surface of the tumor cell of the subject, the set of numerical likelihoods having been identified at least based on received mass spectrometry data; and selecting a subset of the set of antigens based on the set of numerical likelihoods to generate a set of selected antigens; and producing or having produced a tumor vaccine comprising the set of selected antigens.

[0200] The tumor vaccine may include one or more of a nucleotide sequence, a polypeptide sequence, RNA, DNA, a cell, a plasmid, or a vector.

[0201] The tumor vaccine may include one or more antigens presented on the tumor cell surface.

[0202] The tumor vaccine may include one or more antigens that is immunogenic in the subject.

[0203] The tumor vaccine may not include one or more antigens that induce an autoimmune response against normal tissue in the subject.

[0204] The tumor vaccine may include an adjuvant.

[0205] The tumor vaccine may include an excipient.

[0206] A method disclosed herein may also include selecting antigens that have an increased likelihood of being presented on the tumor cell surface relative to unselected antigens based on the presentation model.

[0207] A method disclosed herein may also include selecting antigens that have an increased likelihood of being capable of inducing a tumor-specific immune response in the subject relative to unselected antigens based on the presentation model.

[0208] A method disclosed herein may also include selecting antigens that have an increased likelihood of being capable of being presented to naïve T cells by professional antigen presenting cells (APCs) relative to unselected antigens based on the presentation model, optionally wherein the APC is a dendritic cell (DC).

[0209] A method disclosed herein may also include selecting antigens that have a decreased likelihood of being subject to inhibition via central or peripheral tolerance relative to unselected antigens based on the presentation model.

[0210] A method disclosed herein may also include selecting antigens that have a decreased likelihood of being capable of inducing an autoimmune response to normal tissue in the subject relative to unselected antigens based on the presentation model.

[0211] The exome or transcriptome nucleotide sequencing and/or expression data may be obtained by performing sequencing on the tumor tissue.

[0212] The sequencing may be next generation sequencing (NGS) or any massively parallel sequencing approach.

[0213] The set of numerical likelihoods may be further identified by at least MHC-allele interacting features comprising at least one of: the predicted affinity with which the MHC allele and the antigen encoded peptide bind; the predicted stability of the antigen encoded peptide-MHC complex; the sequence and length of the antigen encoded peptide; the probability of presentation of antigen encoded peptides with similar sequence in cells from other individuals expressing the particular MHC allele as assessed by mass-spectrometry proteomics or other means; the expression levels of the particular MHC allele in the subject in question (e.g. as measured by RNA-seq or mass spectrometry); the overall neoantigen encoded peptide-sequence-independent probability of presentation by the particular MHC allele in other distinct subjects who express the particular MHC allele; the overall neoantigen encoded peptide-sequence-independent probability of presentation by MHC alleles in the same family of molecules (e.g., HLA-A, HLA-B, HLA-C, HLA-DQ, HLA-DR, HLA-DP) in other distinct subjects.

[0214] The set of numerical likelihoods are further identified by at least MHC-allele noninteracting features comprising at least one of: the C- and N-terminal sequences flanking the neoantigen encoded peptide within its source protein sequence; the presence of protease cleavage motifs in the neoantigen encoded peptide, optionally weighted according to the expression of corresponding proteases in the tumor cells (as measured by RNA-seq or mass spectrometry); the turnover rate of the source protein as measured in the appropriate cell type; the length of the source protein, optionally considering the specific splice variants (“isoforms”) most highly expressed in the tumor cells as measured by RNA-seq or proteome mass spectrometry, or as predicted from the annotation of germline or somatic splicing mutations detected in DNA or RNA sequence data; the level of expression of the proteasome, immunoproteasome, thymoproteasome, or other proteases in the tumor cells (which may be measured by RNA-seq, proteome mass spectrometry, or immunohistochemistry); the expression of the source gene of the neoantigen encoded peptide (e.g., as measured by RNA-seq or mass spectrometry); the typical tissue-specific expression of the source gene of the neoantigen encoded peptide during various stages of the cell cycle; a comprehensive catalog of features of the source protein and/or its domains as can be found in e.g. uniProt or PDB http://www.rcsb.org/pdb/home/home.do; features describing the properties of the domain of the source protein containing the peptide, for example: secondary or tertiary structure (e.g., alpha helix vs beta sheet); alternative splicing; the probability of presentation of peptides from the source protein of the neoantigen encoded peptide in question in other distinct subjects; the probability that the peptide will not be detected or over-represented by mass spectrometry due to technical biases; the expression of various gene modules/pathways as measured by RNASeq (which need not contain the source protein of the peptide) that are informative about the state of the tumor cells, stroma, or tumor-infiltrating lymphocytes (TLs); the copy number of the source gene of the neoantigen encoded peptide in the tumor cells; the probability that the peptide binds to the TAP or the measured or predicted binding affinity of the peptide to the TAP; the expression level of TAP in the tumor cells (which may be measured by RNA-seq, proteome mass spectrometry, immunohistochemistry); presence or absence of tumor mutations, including, but not limited to: driver mutations in known cancer driver genes such as EGFR, KRAS, ALK, RET, ROS1, TP53, CDKN2A, CDKN2B, NTRK1, NTRK2, NTRK3, and in genes encoding the proteins involved in the antigen presentation machinery (e.g., B2M, HLA-A, HLA-B, HLA-C, TAP-1, TAP-2, TAPBP, CALR, CNX, ERP57, HLA-DM, HLA-DMA, HLA-DMB, HLA-DO, HLA-DOA, HLA-DOB, HLA-DP, HLA-DPA1, HLA-DPB1, HLA-DQ, HLA-DQA1, HLA-DQA2, HLA-DQB1, HLA-DQB2, HLA-DR, HLA-DRA, HLA-DRB1, HLA-DRB3, HLA-DRB4, HLA-DRB5 or any of the genes coding for components of the proteasome or immunoproteasome). Peptides whose presentation relies on a component of the antigen-presentation machinery that is subject to loss-of-function mutation in the tumor have reduced probability of presentation; presence or absence of functional germline polymorphisms, including, but not limited to: in genes encoding the proteins involved in the antigen presentation machinery (e.g., B2M, HLA-A, HLA-B, HLA-C, TAP-1, TAP-2, TAPBP, CALR, CNX, ERP57, HLA-DM, HLA-DMA, HLA-DMB, HLA-DO, HLA-DOA, HLA-DOB, HLA-DP, HLA-DPA1, HLA-DPB1, HLA-DQ, HLA-DQA1, HLA-DQA2, HLA-DQB1, HLA-DQB2, HLA-DR, HLA-DRA, HLA-DRB1, HLA-DRB3, HLA-DRB4, HLA-DRB5 or any of the genes coding for components of the proteasome or immunoproteasome); tumor type (e.g., NSCLC, melanoma); clinical tumor subtype (e.g., squamous lung cancer vs. non-squamous); smoking history; the typical expression of the source gene of the peptide in the relevant tumor type or clinical subtype, optionally stratified by driver mutation.

[0215] The at least one alteration may be a frameshift or nonframeshift indel, missense or nonsense substitution, splice site alteration, genomic rearrangement or gene fusion, or any genomic or expression alteration giving rise to a neoORF.

[0216] The tumor cell may be selected from the group consisting of: lung cancer, melanoma, breast cancer, ovarian cancer, prostate cancer, kidney cancer, gastric cancer, colon cancer, testicular cancer, head and neck cancer, pancreatic cancer, brain cancer, B-cell lymphoma, acute myelogenous leukemia, chronic myelogenous leukemia, chronic lymphocytic leukemia, and T cell lymphocytic leukemia, non-small cell lung cancer, and small cell lung cancer.

[0217] A method disclosed herein may also include obtaining a tumor vaccine comprising the set of selected neoantigens or a subset thereof, optionally further comprising administering the tumor vaccine to the subject.

[0218] At least one of neoantigens in the set of selected neoantigens, when in polypeptide form, may include at least one of: a binding affinity with MHC with an IC50 value of less than 1000 nM, for MHC Class I polypeptides a length of 8-15, 8, 9, 10, 11, 12, 13, 14, or 15 amino acids, for MHC Class II polypeptides a length of 6-30, 6, 7, 8, 9, 10, 11, 12, 13, 14, 15, 16, 17, 18,19, 20, 21, 22, 23, 24, 25, 26, 27, 28, 29, or 30 amino acids, presence of sequence motifs within or near the polypeptide in the parent protein sequence promoting proteasome cleavage, and presence of sequence motifs promoting TAP transport. For MHC Class II, presence of sequence motifs within or near the peptide promoting cleavage by extracellular or lysosomal proteases (e.g., cathepsins) or HLA-DM catalyzed HLA binding.

[0219] Disclosed herein is are methods for identifying one or more neoantigens that are likely to be presented on a tumor cell surface of a tumor cell, comprising executing the steps of: receiving mass spectrometry data comprising data associated with a plurality of isolated peptides eluted from major histocompatibility complex (MHC) derived from a plurality of fresh or frozen tumor samples; obtaining a training data set by at least identifying a set of training peptide sequences present in the tumor samples and presented on one or more MHC alleles associated with each training peptide sequence; obtaining a set of training protein sequences based on the training peptide sequences; and training a set of numerical parameters of a presentation model using the training protein sequences and the training peptide sequences, the presentation model providing a plurality of numerical likelihoods that peptide sequences from the tumor cell are presented by one or more MHC alleles on the tumor cell surface.

[0220] The presentation model may represent dependence between: presence of a pair of a particular one of the MHC alleles and a particular amino acid at a particular position of a peptide sequence; and likelihood of presentation on the tumor cell surface, by the particular one of the MHC alleles of the pair, of such a peptide sequence comprising the particular amino acid at the particular position.

[0221] A method disclosed herein can also include selecting a subset of neoantigens, wherein the subset of neoantigens is selected because each has an increased likelihood that it is presented on the cell surface of the tumor relative to one or more distinct tumor neoantigens.

[0222] A method disclosed herein can also include selecting a subset of neoantigens, wherein the subset of neoantigens is selected because each has an increased likelihood that it is capable of inducing a tumor-specific immune response in the subject relative to one or more distinct tumor neoantigens.

[0223] A method disclosed herein can also include selecting a subset of neoantigens, wherein the subset of neoantigens is selected because each has an increased likelihood that it is capable of being presented to naïve T cells by professional antigen presenting cells (APCs) relative to one or more distinct tumor neoantigens, optionally wherein the APC is a dendritic cell (DC).

[0224] A method disclosed herein can also include selecting a subset of neoantigens, wherein the subset of neoantigens is selected because each has a decreased likelihood that it is subject to inhibition via central or peripheral tolerance relative to one or more distinct tumor neoantigens.

[0225] A method disclosed herein can also include selecting a subset of neoantigens, wherein the subset of neoantigens is selected because each has a decreased likelihood that it is capable of inducing an autoimmune response to normal tissue in the subject relative to one or more distinct tumor neoantigens.

[0226] A method disclosed herein can also include selecting a subset of neoantigens, wherein the subset of neoantigens is selected because each has a decreased likelihood that it will be differentially post-translationally modified in tumor cells versus APCs, optionally wherein the APC is a dendritic cell (DC).

[0227] The practice of the methods herein will employ, unless otherwise indicated, conventional methods of protein chemistry, biochemistry, recombinant DNA techniques and pharmacology, within the skill of the art. Such techniques are explained fully in the literature. See, e.g., T. E. Creighton, Proteins: Structures and Molecular Properties (W.H. Freeman and Company, 1993); A. L. Lehninger, Biochemistry (Worth Publishers, Inc., current addition); Sambrook, et al., Molecular Cloning: A Laboratory Manual (2nd Edition, 1989); Methods In Enzymology (S. Colowick and N. Kaplan eds., Academic Press, Inc.); Remington's Pharmaceutical Sciences, 18th Edition (Easton, Pa.: Mack Publishing Company, 1990); Carey and Sundberg Advanced Organic Chemistry 3^{rd} Ed. (Plenum Press) Vols A and B (1992).

### III. Identification of Tumor Specific Mutations in Neoantigens

[0228] Also disclosed herein are methods for the identification of certain mutations (e.g., the variants or alleles that are present in cancer cells). In particular, these mutations can be present in the genome, transcriptome, proteome, or exome of cancer cells of a subject having cancer but not in normal tissue from the subject. Specific methods for identifying neoantigens, including shared neoantigens, that are specific to tumors are known to those skilled in the art, for example the methods described in more detail in international patent application publications WO/2017/106638, WO/2018/195357, and WO/2018/208856, each herein incorporated by reference, in their entirety, for all purposes.

[0229] Genetic mutations in tumors can be considered useful for the immunological targeting of tumors if they lead to changes in the amino acid sequence of a protein exclusively in the tumor. Useful mutations include: (1) non-synonymous mutations leading to different amino acids in the protein; (2) read-through mutations in which a stop codon is modified or deleted, leading to translation of a longer protein with a novel tumor-specific sequence at the C-terminus; (3) splice site mutations that lead to the inclusion of an intron in the mature mRNA and thus a unique tumor-specific protein sequence; (4) chromosomal rearrangements that give rise to a chimeric protein with tumor-specific sequences at the junction of 2 proteins (i.e., gene fusion); (5) frameshift mutations or deletions that lead to a new open reading frame with a novel tumor-specific protein sequence. Mutations can also include one or more of nonframeshift indel, missense or nonsense substitution, splice site alteration, genomic rearrangement or gene fusion, or any genomic or expression alteration giving rise to a neoORF.

[0230] Peptides with mutations or mutated polypeptides arising from for example, splice-site, frameshift, readthrough, or gene fusion mutations in tumor cells can be identified by sequencing DNA, RNA or protein in tumor versus normal cells.

[0231] Also mutations can include previously identified tumor specific mutations. Known tumor mutations can be found at the Catalogue of Somatic Mutations in Cancer (COSMIC) database.

[0232] A variety of methods are available for detecting the presence of a particular mutation or allele in an individual's DNA or RNA. Advancements in this field have provided accurate, easy, and inexpensive large-scale SNP genotyping. For example, several techniques have been described including dynamic allele-specific hybridization (DASH), microplate array diagonal gel electrophoresis (MADGE), pyrosequencing, oligonucleotide-specific ligation, the TaqMan system as well as various DNA “chip” technologies such as the Affymetrix SNP chips. These methods utilize amplification of a target genetic region, typically by PCR. Still other methods, based on the generation of small signal molecules by invasive cleavage followed by mass spectrometry or immobilized padlock probes and rolling-circle amplification. Several of the methods known in the art for detecting specific mutations are summarized below.

[0233] PCR based detection means can include multiplex amplification of a plurality of markers simultaneously. For example, it is well known in the art to select PCR primers to generate PCR products that do not overlap in size and can be analyzed simultaneously. Alternatively, it is possible to amplify different markers with primers that are differentially labeled and thus can each be differentially detected. Of course, hybridization based detection means allow the differential detection of multiple PCR products in a sample. Other techniques are known in the art to allow multiplex analyses of a plurality of markers.

[0234] Several methods have been developed to facilitate analysis of single nucleotide polymorphisms in genomic DNA or cellular RNA. For example, a single base polymorphism can be detected by using a specialized exonuclease-resistant nucleotide, as disclosed, e.g., in Mundy, C. R. (U.S. Pat. No. 4,656,127). According to the method, a primer complementary to the allelic sequence immediately 3′ to the polymorphic site is permitted to hybridize to a target molecule obtained from a particular animal or human. If the polymorphic site on the target molecule contains a nucleotide that is complementary to the particular exonuclease-resistant nucleotide derivative present, then that derivative will be incorporated onto the end of the hybridized primer. Such incorporation renders the primer resistant to exonuclease, and thereby permits its detection. Since the identity of the exonuclease-resistant derivative of the sample is known, a finding that the primer has become resistant to exonucleases reveals that the nucleotide(s) present in the polymorphic site of the target molecule is complementary to that of the nucleotide derivative used in the reaction. This method has the advantage that it does not require the determination of large amounts of extraneous sequence data.

[0235] A solution-based method can be used for determining the identity of a nucleotide of a polymorphic site. Cohen, D. et al. (French Patent 2,650,840; PCT Appln. No. WO91/02087). As in the Mundy method of U.S. Pat. No. 4,656,127, a primer is employed that is complementary to allelic sequences immediately 3′ to a polymorphic site. The method determines the identity of the nucleotide of that site using labeled dideoxynucleotide derivatives, which, if complementary to the nucleotide of the polymorphic site will become incorporated onto the terminus of the primer.

[0236] An alternative method, known as Genetic Bit Analysis or GBA is described by Goelet, P. et al. (PCT Appln. No. 92/15712). The method of Goelet, P. et al. uses mixtures of labeled terminators and a primer that is complementary to the sequence 3′ to a polymorphic site. The labeled terminator that is incorporated is thus determined by, and complementary to, the nucleotide present in the polymorphic site of the target molecule being evaluated. In contrast to the method of Cohen et al. (French Patent 2,650,840; PCT Appln. No. WO91/02087) the method of Goelet, P. et al. can be a heterogeneous phase assay, in which the primer or the target molecule is immobilized to a solid phase.

[0237] Several primer-guided nucleotide incorporation procedures for assaying polymorphic sites in DNA have been described (Komher, J. S. et al., Nucl. Acids. Res. 17:7779-7784 (1989); Sokolov, B. P., Nucl. Acids Res. 18:3671 (1990); Syvanen, A.-C., et al., Genomics 8:684-692 (1990); Kuppuswamy, M. N. et al., Proc. Natl. Acad. Sci. (U.S.A.) 88:1143-1147 (1991); Prezant, T. R. et al., Hum. Mutat. 1:159-164 (1992); Ugozzoli, L. et al., GATA 9:107-112 (1992); Nyren, P. et al., Anal. Biochem. 208:171-175 (1993)). These methods differ from GBA in that they utilize incorporation of labeled deoxynucleotides to discriminate between bases at a polymorphic site. In such a format, since the signal is proportional to the number of deoxynucleotides incorporated, polymorphisms that occur in runs of the same nucleotide can result in signals that are proportional to the length of the run (Syvanen, A.-C., et al., Amer. J. Hum. Genet. 52:46-59 (1993)).

[0238] A number of initiatives obtain sequence information directly from millions of individual molecules of DNA or RNA in parallel. Real-time single molecule sequencing-by-synthesis technologies rely on the detection of fluorescent nucleotides as they are incorporated into a nascent strand of DNA that is complementary to the template being sequenced. In one method, oligonucleotides 30-50 bases in length are covalently anchored at the 5′ end to glass cover slips. These anchored strands perform two functions. First, they act as capture sites for the target template strands if the templates are configured with capture tails complementary to the surface-bound oligonucleotides. They also act as primers for the template directed primer extension that forms the basis of the sequence reading. The capture primers function as a fixed position site for sequence determination using multiple cycles of synthesis, detection, and chemical cleavage of the dye-linker to remove the dye. Each cycle consists of adding the polymerase/labeled nucleotide mixture, rinsing, imaging and cleavage of dye. In an alternative method, polymerase is modified with a fluorescent donor molecule and immobilized on a glass slide, while each nucleotide is color-coded with an acceptor fluorescent moiety attached to a gamma-phosphate. The system detects the interaction between a fluorescently-tagged polymerase and a fluorescently modified nucleotide as the nucleotide becomes incorporated into the de novo chain. Other sequencing-by-synthesis technologies also exist.

[0239] Any suitable sequencing-by-synthesis platform can be used to identify mutations. As described above, four major sequencing-by-synthesis platforms are currently available: the Genome Sequencers from Roche/454 Life Sciences, the 1G Analyzer from Illumina/Solexa, the SOLiD system from Applied BioSystems, and the Heliscope system from Helicos Biosciences. Sequencing-by-synthesis platforms have also been described by Pacific BioSciences and VisiGen Biotechnologies. In some embodiments, a plurality of nucleic acid molecules being sequenced is bound to a support (e.g., solid support). To immobilize the nucleic acid on a support, a capture sequence/universal priming site can be added at the 3′ and/or 5′ end of the template. The nucleic acids can be bound to the support by hybridizing the capture sequence to a complementary sequence covalently attached to the support. The capture sequence (also referred to as a universal capture sequence) is a nucleic acid sequence complementary to a sequence attached to a support that may dually serve as a universal primer.

[0240] As an alternative to a capture sequence, a member of a coupling pair (such as, e.g., antibody/antigen, receptor/ligand, or the avidin-biotin pair as described in, e.g., US Patent Application No. 2006/0252077) can be linked to each fragment to be captured on a surface coated with a respective second member of that coupling pair.

[0241] Subsequent to the capture, the sequence can be analyzed, for example, by single molecule detection/sequencing, e.g., as described in the Examples and in U.S. Pat. No. 7,283,337, including template-dependent sequencing-by-synthesis. In sequencing-by-synthesis, the surface-bound molecule is exposed to a plurality of labeled nucleotide triphosphates in the presence of polymerase. The sequence of the template is determined by the order of labeled nucleotides incorporated into the 3′ end of the growing chain. This can be done in real time or can be done in a step-and-repeat mode. For real-time analysis, different optical labels to each nucleotide can be incorporated and multiple lasers can be utilized for stimulation of incorporated nucleotides.

[0242] Sequencing can also include other massively parallel sequencing or next generation sequencing (NGS) techniques and platforms. Additional examples of massively parallel sequencing techniques and platforms are the Illumina HiSeq or MiSeq, Thermo PGM or Proton, the Pac Bio RS II or Sequel, Qiagen's Gene Reader, and the Oxford Nanopore MinION. Additional similar current massively parallel sequencing technologies can be used, as well as future generations of these technologies.

[0243] Any cell type or tissue can be utilized to obtain nucleic acid samples for use in methods described herein. For example, a DNA or RNA sample can be obtained from a tumor or a bodily fluid, e.g., blood, obtained by known techniques (e.g. venipuncture) or saliva. Alternatively, nucleic acid tests can be performed on dry samples (e.g. hair or skin). In addition, a sample can be obtained for sequencing from a tumor and another sample can be obtained from normal tissue for sequencing where the normal tissue is of the same tissue type as the tumor. A sample can be obtained for sequencing from a tumor and another sample can be obtained from normal tissue for sequencing where the normal tissue is of a distinct tissue type relative to the tumor.

[0244] Tumors can include one or more of lung cancer, melanoma, breast cancer, ovarian cancer, prostate cancer, kidney cancer, gastric cancer, colon cancer, testicular cancer, head and neck cancer, pancreatic cancer, brain cancer, B-cell lymphoma, acute myelogenous leukemia, chronic myelogenous leukemia, chronic lymphocytic leukemia, and T cell lymphocytic leukemia, non-small cell lung cancer, and small cell lung cancer.

[0245] Alternatively, protein mass spectrometry can be used to identify or validate the presence of mutated peptides bound to MHC proteins on tumor cells. Peptides can be acid-eluted from tumor cells or from HLA molecules that are immunoprecipitated from tumor, and then identified using mass spectrometry.

### IV. Antigens

[0246] Antigens can include nucleotides or polypeptides. For example, a antigen can be an RNA sequence that encodes for a polypeptide sequence. Antigens useful in vaccines can therefore include nucleotide sequences or polypeptide sequences.

[0247] Disclosed herein are isolated peptides that comprise tumor specific mutations identified by the methods disclosed herein, peptides that comprise known tumor specific mutations, and mutant polypeptides or fragments thereof identified by methods disclosed herein. Neoantigen peptides can be described in the context of their coding sequence where a neoantigen includes the nucleotide sequence (e.g., DNA or RNA) that codes for the related polypeptide sequence.

[0248] Also disclosed herein are peptides derived from any polypeptide known to or have been found to have altered expression in a tumor cell or cancerous tissue in comparison to a normal cell or tissue, for example any polypeptide known to or have been found to be aberrantly expressed in a tumor cell or cancerous tissue in comparison to a normal cell or tissue. Suitable polypeptides from which the antigenic peptides can be derived can be found for example in the COSMIC database. COSMIC curates comprehensive information on somatic mutations in human cancer. The peptide contains the tumor specific mutation.

[0249] One or more polypeptides encoded by a antigen nucleotide sequence can comprise at least one of: a binding affinity with MHC with an IC50 value of less than 1000 nM, for MHC Class I peptides a length of 8-15, 8, 9, 10, 11, 12, 13, 14, or 15 amino acids, presence of sequence motifs within or near the peptide promoting proteasome cleavage, and presence or sequence motifs promoting TAP transport. For MHC Class II peptides a length 6-30, 6, 7, 8, 9, 10, 11, 12, 13, 14, 15, 16, 17, 18,19, 20, 21, 22, 23, 24, 25, 26, 27, 28, 29, or 30 amino acids, presence of sequence motifs within or near the peptide promoting cleavage by extracellular or lysosomal proteases (e.g., cathepsins) or HLA-DM catalyzed HLA binding.

[0250] One or more antigens can be presented on the surface of a tumor.

[0251] One or more antigens can be is immunogenic in a subject having a tumor, e.g., capable of eliciting a T cell response or a B cell response in the subject.

[0252] One or more antigens that induce an autoimmune response in a subject can be excluded from consideration in the context of vaccine generation for a subject having a tumor.

[0253] The size of at least one antigenic peptide molecule can comprise, but is not limited to, about 5, about 6, about 7, about 8, about 9, about 10, about 11, about 12, about 13, about 14, about 15, about 16, about 17, about 18, about 19, about 20, about 21, about 22, about 23, about 24, about 25, about 26, about 27, about 28, about 29, about 30, about 31, about 32, about 33, about 34, about 35, about 36, about 37, about 38, about 39, about 40, about 41, about 42, about 43, about 44, about 45, about 46, about 47, about 48, about 49, about 50, about 60, about 70, about 80, about 90, about 100, about 110, about 120 or greater amino molecule residues, and any range derivable therein. In specific embodiments the antigenic peptide molecules are equal to or less than 50 amino acids.

[0254] Antigenic peptides and polypeptides can be: for MHC Class 115 residues or less in length and usually consist of between about 8 and about 11 residues, particularly 9 or 10 residues; for MHC Class II, 6-30 residues, inclusive.

[0255] If desirable, a longer peptide can be designed in several ways. In one case, when presentation likelihoods of peptides on HLA alleles are predicted or known, a longer peptide could consist of either: (1) individual presented peptides with an extensions of 2-5 amino acids toward the N- and C-terminus of each corresponding gene product; (2) a concatenation of some or all of the presented peptides with extended sequences for each. In another case, when sequencing reveals a long (>10 residues) neoepitope sequence present in the tumor (e.g. due to a frameshift, read-through or intron inclusion that leads to a novel peptide sequence), a longer peptide would consist of: (3) the entire stretch of novel tumor-specific amino acids—thus bypassing the need for computational or in vitro test-based selection of the strongest HLA-presented shorter peptide. In both cases, use of a longer peptide allows endogenous processing by patient cells and may lead to more effective antigen presentation and induction of T cell responses.

[0256] Antigenic peptides and polypeptides can be presented on an HLA protein. In some aspects antigenic peptides and polypeptides are presented on an HLA protein with greater affinity than a wild-type peptide. In some aspects, a antigenic peptide or polypeptide can have an IC50 of at least less than 5000 nM, at least less than 1000 nM, at least less than 500 nM, at least less than 250 nM, at least less than 200 nM, at least less than 150 nM, at least less than 100 nM, at least less than 50 nM or less.

[0257] In some aspects, antigenic peptides and polypeptides do not induce an autoimmune response and/or invoke immunological tolerance when administered to a subject.

[0258] Also provided are compositions comprising at least two or more antigenic peptides. In some embodiments the composition contains at least two distinct peptides. At least two distinct peptides can be derived from the same polypeptide. By distinct polypeptides is meant that the peptide vary by length, amino acid sequence, or both. The peptides are derived from any polypeptide known to or have been found to contain a tumor specific mutation or peptides derived from any polypeptide known to or have been found to have altered expression in a tumor cell or cancerous tissue in comparison to a normal cell or tissue, for example any polypeptide known to or have been found to be aberrantly expressed in a tumor cell or cancerous tissue in comparison to a normal cell or tissue. Suitable polypeptides from which the antigenic peptides can be derived can be found for example in the COSMIC database or the AACR Genomics Evidence Neoplasia Information Exchange (GENIE) database. COSMIC curates comprehensive information on somatic mutations in human cancer. AACR GENIE aggregates and links clinical-grade cancer genomic data with clinical outcomes from tens of thousands of cancer patients. The peptide contains the tumor specific mutation. In some aspects the tumor specific mutation is a driver mutation for a particular cancer type.

[0259] Antigenic peptides and polypeptides having a desired activity or property can be modified to provide certain desired attributes, e.g., improved pharmacological characteristics, while increasing or at least retaining substantially all of the biological activity of the unmodified peptide to bind the desired MHC molecule and activate the appropriate T cell. For instance, antigenic peptide and polypeptides can be subject to various changes, such as substitutions, either conservative or non-conservative, where such changes might provide for certain advantages in their use, such as improved MHC binding, stability or presentation. By conservative substitutions is meant replacing an amino acid residue with another which is biologically and/or chemically similar, e.g., one hydrophobic residue for another, or one polar residue for another. The substitutions include combinations such as Gly, Ala; Val, Ile, Leu, Met; Asp, Glu; Asn, Gln; Ser, Thr; Lys, Arg; and Phe, Tyr. The effect of single amino acid substitutions may also be probed using D-amino acids. Such modifications can be made using well known peptide synthesis procedures, as described in e.g., Merrifield, Science 232:341-347 (1986), Barany & Merrifield, The Peptides, Gross & Meienhofer, eds. (N.Y., Academic Press), pp. 1-284 (1979); and Stewart & Young, Solid Phase Peptide Synthesis, (Rockford, Ill., Pierce), 2d Ed. (1984).

[0260] Modifications of peptides and polypeptides with various amino acid mimetics or unnatural amino acids can be particularly useful in increasing the stability of the peptide and polypeptide in vivo. Stability can be assayed in a number of ways. For instance, peptidases and various biological media, such as human plasma and serum, have been used to test stability. See, e.g., Verhoef et al., Eur. J. Drug Metab Pharmacokin. 11:291-302 (1986). Half-life of the peptides can be conveniently determined using a 25% human serum (v/v) assay. The protocol is generally as follows. Pooled human serum (Type AB, non-heat inactivated) is delipidated by centrifugation before use. The serum is then diluted to 25% with RPMI tissue culture media and used to test peptide stability. At predetermined time intervals a small amount of reaction solution is removed and added to either 6% aqueous trichloracetic acid or ethanol. The cloudy reaction sample is cooled (4 degrees C.) for 15 minutes and then spun to pellet the precipitated serum proteins. The presence of the peptides is then determined by reversed-phase HPLC using stability-specific chromatography conditions.

[0261] The peptides and polypeptides can be modified to provide desired attributes other than improved serum half-life. For instance, the ability of the peptides to induce CTL activity can be enhanced by linkage to a sequence which contains at least one epitope that is capable of inducing a T helper cell response. Immunogenic peptides/T helper conjugates can be linked by a spacer molecule. The spacer is typically comprised of relatively small, neutral molecules, such as amino acids or amino acid mimetics, which are substantially uncharged under physiological conditions. The spacers are typically selected from, e.g., Ala, Gly, or other neutral spacers of nonpolar amino acids or neutral polar amino acids. It will be understood that the optionally present spacer need not be comprised of the same residues and thus can be a hetero- or homo-oligomer. When present, the spacer will usually be at least one or two residues, more usually three to six residues. Alternatively, the peptide can be linked to the T helper peptide without a spacer.

[0262] A antigenic peptide can be linked to the T helper peptide either directly or via a spacer either at the amino or carboxy terminus of the peptide. The amino terminus of either the antigenic peptide or the T helper peptide can be acylated. Exemplary T helper peptides include tetanus toxoid 830-843, influenza 307-319, malaria circumsporozoite 382-398 and 378-389.

[0263] Proteins or peptides can be made by any technique known to those of skill in the art, including the expression of proteins, polypeptides or peptides through standard molecular biological techniques, the isolation of proteins or peptides from natural sources, or the chemical synthesis of proteins or peptides. The nucleotide and protein, polypeptide and peptide sequences corresponding to various genes have been previously disclosed, and can be found at computerized databases known to those of ordinary skill in the art. One such database is the National Center for Biotechnology Information's Genbank and GenPept databases located at the National Institutes of Health website. The coding regions for known genes can be amplified and/or expressed using the techniques disclosed herein or as would be known to those of ordinary skill in the art. Alternatively, various commercial preparations of proteins, polypeptides and peptides are known to those of skill in the art.

[0264] In a further aspect a antigen includes a nucleic acid (e.g. polynucleotide) that encodes a antigenic peptide or portion thereof. The polynucleotide can be, e.g., DNA, cDNA, PNA, CNA, RNA (e.g., mRNA), either single- and/or double-stranded, or native or stabilized forms of polynucleotides, such as, e.g., polynucleotides with a phosphorothiate backbone, or combinations thereof and it may or may not contain introns. A still further aspect provides an expression vector capable of expressing a polypeptide or portion thereof. Expression vectors for different cell types are well known in the art and can be selected without undue experimentation. Generally, DNA is inserted into an expression vector, such as a plasmid, in proper orientation and correct reading frame for expression. If necessary, DNA can be linked to the appropriate transcriptional and translational regulatory control nucleotide sequences recognized by the desired host, although such controls are generally available in the expression vector. The vector is then introduced into the host through standard techniques. Guidance can be found e.g. in Sambrook et al. (1989) Molecular Cloning, A Laboratory Manual, Cold Spring Harbor Laboratory, Cold Spring Harbor, N.Y.

### V. Vaccine Compositions

[0265] Also disclosed herein is an immunogenic composition, e.g., a vaccine composition, capable of raising a specific immune response, e.g., a tumor-specific immune response. Vaccine compositions typically comprise one or a plurality of antigens, e.g., selected using a method described herein. Vaccine compositions can also be referred to as vaccines.

[0266] A vaccine can contain between 1 and 30 peptides, 2, 3, 4, 5, 6, 7, 8, 9, 10, 11, 12, 13, 14, 15, 16, 17, 18, 19, 20, 21, 22, 23, 24, 25, 26, 27, 28, 29, or 30 different peptides, 6, 7, 8, 9, 10 11, 12, 13, or 14 different peptides, or 12, 13 or 14 different peptides. Peptides can include post-translational modifications. A vaccine can contain between 1 and 100 or more nucleotide sequences, 2, 3, 4, 5, 6, 7, 8, 9, 10, 11, 12, 13, 14, 15, 16, 17, 18, 19, 20, 21, 22, 23, 24, 25, 26, 27, 28, 29, 30, 31, 32, 33, 34, 35, 36, 37, 38, 39, 40, 41, 42, 43, 44, 45, 46, 47, 48, 49, 50, 51, 52, 53, 54, 55, 56, 57, 58, 59, 60, 61, 62, 63, 64, 65, 66, 67, 68, 69, 70, 71, 72, 73, 74, 75, 76, 77, 78, 79, 80, 81, 82, 83, 84, 85, 86, 87, 88, 89, 90, 91, 92, 93, 94,95, 96, 97, 98, 99, 100 or more different nucleotide sequences, 6, 7, 8, 9, 10 11, 12, 13, or 14 different nucleotide sequences, or 12, 13 or 14 different nucleotide sequences. A vaccine can contain between 1 and 30 antigen sequences, 2, 3, 4, 5, 6, 7, 8, 9, 10, 11, 12, 13, 14, 15, 16, 17, 18, 19, 20, 21, 22, 23, 24, 25, 26, 27, 28, 29, 30, 31, 32, 33, 34, 35, 36, 37, 38, 39, 40, 41, 42, 43, 44, 45, 46, 47, 48, 49, 50, 51, 52, 53, 54, 55, 56, 57, 58, 59, 60, 61, 62, 63, 64, 65, 66, 67, 68, 69, 70, 71, 72, 73, 74, 75, 76, 77, 78, 79, 80, 81, 82, 83, 84, 85, 86, 87, 88, 89, 90, 91, 92, 93, 94, 95, 96, 97, 98, 99, 100 or more different antigen sequences, 6, 7, 8, 9, 10 11, 12, 13, or 14 different antigen sequences, or 12, 13 or 14 different antigen sequences.

[0267] In one embodiment, different peptides and/or polypeptides or nucleotide sequences encoding them are selected so that the peptides and/or polypeptides capable of associating with different MHC molecules, such as different MHC class I molecules and/or different MHC class II molecules. In some aspects, one vaccine composition comprises coding sequence for peptides and/or polypeptides capable of associating with the most frequently occurring MHC class I molecules and/or different MHC class II molecules. Hence, vaccine compositions can comprise different fragments capable of associating with at least 2 preferred, at least 3 preferred, or at least 4 preferred MHC class I molecules and/or different MHC class II molecules.

[0268] The vaccine composition can be capable of raising a specific cytotoxic T-cells response and/or a specific helper T-cell response.

[0269] A vaccine composition can further comprise an adjuvant and/or a carrier. Examples of useful adjuvants and carriers are given herein below. A composition can be associated with a carrier such as e.g. a protein or an antigen-presenting cell such as e.g. a dendritic cell (DC) capable of presenting the peptide to a T-cell.

[0270] Adjuvants are any substance whose admixture into a vaccine composition increases or otherwise modifies the immune response to a antigen. Carriers can be scaffold structures, for example a polypeptide or a polysaccharide, to which a antigen, is capable of being associated. Optionally, adjuvants are conjugated covalently or non-covalently.

[0271] The ability of an adjuvant to increase an immune response to an antigen is typically manifested by a significant or substantial increase in an immune-mediated reaction, or reduction in disease symptoms. For example, an increase in humoral immunity is typically manifested by a significant increase in the titer of antibodies raised to the antigen, and an increase in T-cell activity is typically manifested in increased cell proliferation, or cellular cytotoxicity, or cytokine secretion. An adjuvant may also alter an immune response, for example, by changing a primarily humoral or Th response into a primarily cellular, or Th response.

[0272] Suitable adjuvants include, but are not limited to 1018 ISS, alum, aluminium salts, Amplivax, AS15, BCG, CP-870,893, CpG7909, CyaA, dSLIM, GM-CSF, IC30, IC31, Imiquimod, ImuFact IMP321, IS Patch, ISS, ISCOMATRIX, JuvImmune, LipoVac, MF59, monophosphoryl lipid A, Montanide IMS 1312, Montanide ISA 206, Montanide ISA 50V, Montanide ISA-51, OK-432, OM-174, OM-197-MP-EC, ONTAK, PepTel vector system, PLG microparticles, resiquimod, SRL172, Virosomes and other Virus-like particles, YF-17D, VEGF trap, R848, beta-glucan, Pam3Cys, Aquila's QS21 stimulon (Aquila Biotech, Worcester, Mass., USA) which is derived from saponin, mycobacterial extracts and synthetic bacterial cell wall mimics, and other proprietary adjuvants such as Ribi's Detox. Quil or Superfos. Adjuvants such as incomplete Freund's or GM-CSF are useful. Several immunological adjuvants (e.g., MF59) specific for dendritic cells and their preparation have been described previously (Dupuis M, et al., Cell Immunol. 1998; 186(1):18-27; Allison A C; Dev Biol Stand. 1998; 92:3-11). Also cytokines can be used. Several cytokines have been directly linked to influencing dendritic cell migration to lymphoid tissues (e.g., TNF-alpha), accelerating the maturation of dendritic cells into efficient antigen-presenting cells for T-lymphocytes (e.g., GM-CSF, IL-1 and IL-4) (U.S. Pat. No. 5,849,589, specifically incorporated herein by reference in its entirety) and acting as immunoadjuvants (e.g., IL-12) (Gabrilovich D I, et al., J Immunother Emphasis Tumor Immunol. 1996 (6):414-418).

[0273] CpG immunostimulatory oligonucleotides have also been reported to enhance the effects of adjuvants in a vaccine setting. Other TLR binding molecules such as RNA binding TLR 7, TLR 8 and/or TLR 9 may also be used.

[0274] Other examples of useful adjuvants include, but are not limited to, chemically modified CpGs (e.g. CpR, Idera), Poly(I:C)(e.g. polyi:CI2U), non-CpG bacterial DNA or RNA as well as immunoactive small molecules and antibodies such as cyclophosphamide, sunitinib, bevacizumab, celebrex, NCX-4016, sildenafil, tadalafil, vardenafil, sorafinib, XL-999, CP-547632, pazopanib, ZD2171, AZD2171, ipilimumab, tremelimumab, and SC58175, which may act therapeutically and/or as an adjuvant. The amounts and concentrations of adjuvants and additives can readily be determined by the skilled artisan without undue experimentation. Additional adjuvants include colony-stimulating factors, such as Granulocyte Macrophage Colony Stimulating Factor (GM-CSF, sargramostim).

[0275] A vaccine composition can comprise more than one different adjuvant. Furthermore, a therapeutic composition can comprise any adjuvant substance including any of the above or combinations thereof. It is also contemplated that a vaccine and an adjuvant can be administered together or separately in any appropriate sequence.

[0276] A carrier (or excipient) can be present independently of an adjuvant. The function of a carrier can for example be to increase the molecular weight of in particular mutant to increase activity or immunogenicity, to confer stability, to increase the biological activity, or to increase serum half-life. Furthermore, a carrier can aid presenting peptides to T-cells. A carrier can be any suitable carrier known to the person skilled in the art, for example a protein or an antigen presenting cell. A carrier protein could be but is not limited to keyhole limpet hemocyanin, serum proteins such as transferrin, bovine serum albumin, human serum albumin, thyroglobulin or ovalbumin, immunoglobulins, or hormones, such as insulin or palmitic acid. For immunization of humans, the carrier is generally a physiologically acceptable carrier acceptable to humans and safe. However, tetanus toxoid and/or diptheria toxoid are suitable carriers. Alternatively, the carrier can be dextrans for example sepharose.

[0277] Cytotoxic T-cells (CTLs) recognize an antigen in the form of a peptide bound to an MHC molecule rather than the intact foreign antigen itself. The MHC molecule itself is located at the cell surface of an antigen presenting cell. Thus, an activation of CTLs is possible if a trimeric complex of peptide antigen, MHC molecule, and APC is present. Correspondingly, it may enhance the immune response if not only the peptide is used for activation of CTLs, but if additionally APCs with the respective MHC molecule are added. Therefore, in some embodiments a vaccine composition additionally contains at least one antigen presenting cell.

[0278] Antigens can also be included in viral vector-based vaccine platforms, such as vaccinia, fowlpox, self-replicating alphavirus, marabavirus, adenovirus (See, e.g., Tatsis et al., Adenoviruses, Molecular Therapy (2004) 10, 616-629), or lentivirus, including but not limited to second, third or hybrid second/third generation lentivirus and recombinant lentivirus of any generation designed to target specific cell types or receptors (See, e.g., Hu et al., Immunization Delivered by Lentiviral Vectors for Cancer and Infectious Diseases, Immunol Rev. (2011) 239(1): 45-61, Sakuma et al., Lentiviral vectors: basic to translational, Biochem J. (2012) 443(3):603-18, Cooper et al., Rescue of splicing-mediated intron loss maximizes expression in lentiviral vectors containing the human ubiquitin C promoter, Nucl. Acids Res. (2015) 43 (1): 682-690, Zufferey et al., Self-Inactivating Lentivirus Vector for Safe and Efficient In Vivo Gene Delivery, J. Virol. (1998) 72 (12): 9873-9880). Dependent on the packaging capacity of the above mentioned viral vector-based vaccine platforms, this approach can deliver one or more nucleotide sequences that encode one or more neoantigen peptides. The sequences may be flanked by non-mutated sequences, may be separated by linkers or may be preceded with one or more sequences targeting a subcellular compartment (See, e.g., Gros et al., Prospective identification of neoantigen-specific lymphocytes in the peripheral blood of melanoma patients, NatMed. (2016) 22 (4):433-8, Stronen et al., Targeting of cancer neoantigens with donor-derived T cell receptor repertoires, Science. (2016) 352 (6291):1337-41, Lu et al., Efficient identification of mutated cancer antigens recognized by T cells associated with durable tumor regressions, Clin Cancer Res. (2014) 20(13):3401-10). Upon introduction into a host, infected cells express the antigens, and thereby elicit a host immune (e.g., CTL) response against the peptide(s). Vaccinia vectors and methods useful in immunization protocols are described in, e.g., U.S. Pat. No. 4,722,848. Another vector is BCG (Bacille Calmette Guerin). BCG vectors are described in Stover et al. (Nature 351:456-460 (1991)). A wide variety of other vaccine vectors useful for therapeutic administration or immunization of antigens, e.g., Salmonella typhi vectors, and the like will be apparent to those skilled in the art from the description herein.

[0279] V.A. Antigen Cassette

[0280] The methods employed for the selection of one or more antigens, the cloning and construction of a “cassette” and its insertion into a viral vector are within the skill in the art given the teachings provided herein. By “antigen cassette” is meant the combination of a selected antigen or plurality of antigens and the other regulatory elements necessary to transcribe the antigen(s) and express the transcribed product. A antigen or plurality of antigens can be operatively linked to regulatory components in a manner which permits transcription. Such components include conventional regulatory elements that can drive expression of the antigen(s) in a cell transfected with the viral vector. Thus the antigen cassette can also contain a selected promoter which is linked to the antigen(s) and located, with other, optional regulatory elements, within the selected viral sequences of the recombinant vector.

[0281] Useful promoters can be constitutive promoters or regulated (inducible) promoters, which will enable control of the amount of antigen(s) to be expressed. For example, a desirable promoter is that of the cytomegalovirus immediate early promoter/enhancer [see, e.g., Boshart et al, Cell, 41:521-530 (1985)]. Another desirable promoter includes the Rous sarcoma virus LTR promoter/enhancer. Still another promoter/enhancer sequence is the chicken cytoplasmic beta-actin promoter [T. A. Kost et al, Nucl. Acids Res., 11(23):8287 (1983)]. Other suitable or desirable promoters can be selected by one of skill in the art.

[0282] The antigen cassette can also include nucleic acid sequences heterologous to the viral vector sequences including sequences providing signals for efficient polyadenylation of the transcript (poly(A), poly-A or pA) and introns with functional splice donor and acceptor sites. A common poly-A sequence which is employed in the exemplary vectors of this invention is that derived from the papovavirus SV-40. The poly-A sequence generally can be inserted in the cassette following the antigen-based sequences and before the viral vector sequences. A common intron sequence can also be derived from SV-40, and is referred to as the SV-40 T intron sequence. A antigen cassette can also contain such an intron, located between the promoter/enhancer sequence and the antigen(s). Selection of these and other common vector elements are conventional [see, e.g., Sambrook et al, “Molecular Cloning. A Laboratory Manual.”, 2d edit., Cold Spring Harbor Laboratory, New York (1989) and references cited therein] and many such sequences are available from commercial and industrial sources as well as from Genbank.

[0283] A antigen cassette can have one or more antigens. For example, a given cassette can include 1-10, 1-20, 1-30, 10-20, 15-25, 15-20, 1, 2, 3, 4, 5, 6, 7, 8, 9, 10, 11, 12, 13, 14, 15, 16, 17, 18, 19, 20, or more antigens. Antigens can be linked directly to one another. Antigens can also be linked to one another with linkers. Antigens can be in any orientation relative to one another including N to C or C to N.

[0284] As above stated, the antigen cassette can be located in the site of any selected deletion in the viral vector, such as the site of the E1 gene region deletion or E3 gene region deletion, among others which may be selected.

[0285] The antigen cassette can be described using the following formula to describe the ordered sequence of each element, from 5′ to 3′:

(Pₐ-(L5_{b}-N_{c}-L3_{d})_{X})_{Z}—(P2ₕ-(G5ₑ-U_{f})_{Y})_{W}-G3_{g}

[0286] wherein P and P2 comprise promoter nucleotide sequences, N comprises an MHC class I epitope encoding nucleic acid sequence, L5 comprises a 5′ linker sequence, L3 comprises a 3′ linker sequence, G5 comprises a nucleic acid sequences encoding an amino acid linker, G3 comprises one of the at least one nucleic acid sequences encoding an amino acid linker, U comprises an MHC class II antigen-encoding nucleic acid sequence, where for each X the corresponding Nc is a epitope encoding nucleic acid sequence, where for each Y the corresponding Uf is an antigen-encoding nucleic acid sequence. The composition and ordered sequence can be further defined by selecting the number of elements present, for example where a=0 or 1, where b=0 or 1, where c=1, where d=0 or 1, where e=0 or 1, where f=1, where g=0 or 1, where h=0 or 1, X=1 to 400, Y=0, 1, 2, 3, 4 or 5, Z=1 to 400, and W=0, 1, 2, 3, 4 or 5.

[0287] In one example, elements present include where a=0, b=1, d=1, e=1, g=1, h=0, X=10, Y=2, Z=1, and W=1, describing where no additional promoter is present (i.e. only the promoter nucleotide sequence provided by a vector backbone (e.g., a viral backbone such as an alphavirus backbone) is present), 20 MHC class I epitope are present, a 5′ linker is present for each N, a 3′ linker is present for each N, 2 MHC class II epitopes are present, a linker is present linking the two MHC class II epitopes, a linker is present linking the 5′ end of the two MHC class II epitopes to the 3′ linker of the final MHC class I epitope, and a linker is present linking the 3′ end of the two MHC class II epitopes to the to a vector backbone (e.g., a viral backbone such as an alphavirus backbone). Examples of linking the 3′ end of the antigen cassette to a vector backbone (e.g., a viral backbone such as an alphavirus backbone) include linking directly to the 3′ UTR elements provided by a vector backbone (e.g., a viral backbone such as an alphavirus backbone), such as a 3′ 19-nt CSE. Examples of linking the 5′ end of the antigen cassette to a vector backbone (e.g., a viral backbone such as an alphavirus backbone) include linking directly to a 26S promoter sequence, an alphavirus 5′ UTR, a 51-nt CSE, or a 24-nt CSE.

[0288] Other examples include: where a=1 describing where a promoter other than the promoter nucleotide sequence provided by a vector backbone (e.g., a viral backbone such as an alphavirus backbone) is present; where a=1 and Z is greater than 1 where multiple promoters other than the promoter nucleotide sequence provided by a vector backbone (e.g., a viral backbone such as an alphavirus backbone) are present each driving expression of 1 or more distinct MHC class I epitope encoding nucleic acid sequences; where h=1 describing where a separate promoter is present to drive expression of the MHC class II antigen-encoding nucleic acid sequences; and where g=0 describing the MHC class II antigen-encoding nucleic acid sequence, if present, is directly linked to a vector backbone (e.g., a viral backbone such as an alphavirus backbone).

[0289] Other examples include where each MHC class I epitope that is present can have a 5′ linker, a 3′ linker, neither, or both. In examples where more than one MHC class I epitope is present in the same antigen cassette, some MHC class I epitopes may have both a 5′ linker and a 3′ linker, while other MHC class I epitopes may have either a 5′ linker, a 3′ linker, or neither. In other examples where more than one MHC class I epitope is present in the same antigen cassette, some MHC class I epitopes may have either a 5′ linker or a 3′ linker, while other MHC class I epitopes may have either a 5′ linker, a 3′ linker, or neither.

[0290] In examples where more than one MHC class II epitope is present in the same antigen cassette, some MHC class II epitopes may have both a 5′ linker and a 3′ linker, while other MHC class II epitopes may have either a 5′ linker, a 3′ linker, or neither. In other examples where more than one MHC class II epitope is present in the same antigen cassette, some MHC class II epitopes may have either a 5′ linker or a 3′ linker, while other MHC class II epitopes may have either a 5′ linker, a 3′ linker, or neither.

[0291] The promoter nucleotide sequences P and/or P2 can be the same as a promoter nucleotide sequence provided by a vector backbone (e.g., a viral backbone such as an alphavirus backbone). For example, the promoter sequence provided by a vector backbone (e.g., a viral backbone such as an alphavirus backbone), Pn and P2, can each comprise a 26S subgenomic promoter. The promoter nucleotide sequences P and/or P2 can be different from the promoter nucleotide sequence provided by a vector backbone (e.g., a viral backbone such as an alphavirus backbone), as well as can be different from each other.

[0292] The 5′ linker L5 can be a native sequence or a non-natural sequence. Non-natural sequence include, but are not limited to, AAY, RR, and DPP. The 3′ linker L3 can also be a native sequence or a non-natural sequence. Additionally, L5 and L3 can both be native sequences, both be non-natural sequences, or one can be native and the other non-natural. For each X, the amino acid linkers can be 2, 3, 4, 5, 6, 7, 8, 9, 10, 11, 12, 13, 14, 15, 16, 17, 18, 19, 20, 21, 22, 23, 24, 25, 26,27,28,29,30,31,32,33,34,35,36,37,38,39,40,41,42,43,44,45,46,47,48,49,50,51, 52, 53, 54, 55, 56, 57, 58, 59,60,61,62,63,64,65,66,67,68,69,70,71,72,73,74,75,76,77, 78, 79, 80, 81, 82, 83, 84, 85, 86, 87, 88, 89, 90, 91, 92, 93, 94,95, 96, 97, 98, 99, 100 or more amino acids in length. For each X, the amino acid linkers can be also be at least 3, at least 4, at least 5, at least 6, at least 7, at least 8, at least 9, at least 10, at least 11, at least 12, at least 13, at least 14, at least 15, at least 16, at least 17, at least 18, at least 19, at least 20, at least 21, at least 22, at least 23, at least 24, at least 25, at least 26, at least 27, at least 28, at least 29, or at least 30 amino acids in length.

[0293] The amino acid linker G5, for each Y, can be 2, 3, 4, 5, 6, 7, 8, 9, 10, 11, 12, 13, 14, 15, 16, 17, 18, 19,20,21,22,23,24,25,26,27,28,29,30,31,32,33,34,35,36,37,38,39,40,41, 42,43,44,45,46,47,48,49, 50, 51, 52, 53, 54, 55, 56, 57, 58, 59,60,61,62,63,64,65,66,67, 68,69,70,71,72,73,74,75,76,77,78,79, 80, 81, 82, 83, 84, 85, 86, 87, 88, 89,90,91,92,93, 94,95, 96, 97, 98, 99, 100 or more amino acids in length. For each Y, the amino acid linkers can be also be at least 3, at least 4, at least 5, at least 6, at least 7, at least 8, at least 9, at least 10, at least 11, at least 12, at least 13, at least 14, at least 15, at least 16, at least 17, at least 18, at least 19, at least 20, at least 21, at least 22, at least 23, at least 24, at least 25, at least 26, at least 27, at least 28, at least 29, or at least 30 amino acids in length.

[0294] The amino acid linker G3 can be 2, 3, 4, 5, 6, 7, 8, 9, 10, 11, 12, 13, 14, 15, 16, 17, 18, 19,20,21,22,23,24,25,26,27,28,29,30,31,32,33,34,35,36,37,38,39,40,41,42,43,44, 45,46,47,48,49, 50, 51, 52, 53, 54, 55, 56, 57, 58, 59,60,61,62,63,64,65,66,67,68,69,70, 71, 72, 73, 74, 75, 76, 77, 78, 79, 80, 81, 82, 83, 84, 85, 86, 87, 88, 89, 90, 91, 92, 93, 94,95, 96, 97, 98, 99, 100 or more amino acids in length. G3 can be also be at least 3, at least 4, at least 5, at least 6, at least 7, at least 8, at least 9, at least 10, at least 11, at least 12, at least 13, at least 14, at least 15, at least 16, at least 17, at least 18, at least 19, at least 20, at least 21, at least 22, at least 23, at least 24, at least 25, at least 26, at least 27, at least 28, at least 29, or at least 30 amino acids in length.

[0295] For each X, each N can encodes a MHC class I epitope 7-15 amino acids in length. For each X, each N can also encodes a MHC class I epitope 5, 6, 7, 8, 9, 10, 11, 12, 13, 14, 15, 16, 17, 18, 19, 20, 21, 22, 23, 24, 25, 26, 27, 28, 29, or 30 amino acids in length. For each X, each N can also encodes a MHC class I epitope at least 5, at least 6, at least 7, at least 8, at least 9, at least 10, at least 11, at least 12, at least 13, at least 14, at least 15, at least 16, at least 17, at least 18, at least 19, at least 20, at least 21, at least 22, at least 23, at least 24, at least 25, at least 26, at least 27, at least 28, at least 29, or at least 30 amino acids in length.

[0296] V.B. Immune Checkpoints

[0297] Vectors described herein, such as C68 vectors described herein or alphavirus vectors described herein, can comprise a nucleic acid which encodes at least one antigen and the same or a separate vector can comprise a nucleic acid which encodes at least one immune modulator (e.g., an antibody such as an scFv) which binds to and blocks the activity of an immune checkpoint molecule. Vectors can comprise a antigen cassette and one or more nucleic acid molecules encoding a checkpoint inhibitor.

[0298] Illustrative immune checkpoint molecules that can be targeted for blocking or inhibition include, but are not limited to, CTLA-4, 4-1BB (CD137), 4-1BBL (CD137L), PDL1, PDL2, PD1, B7-H3, B7-H4, BTLA, HVEM, TIM3, GAL9, LAG3, TIM3, B7H3, B7H4, VISTA, KIR, 2B4 (belongs to the CD2 family of molecules and is expressed on all NK, γδ, and memory CD8+ (αβ) T cells), CD160 (also referred to as BY55), and CGEN-15049. Immune checkpoint inhibitors include antibodies, or antigen binding fragments thereof, or other binding proteins, that bind to and block or inhibit the activity of one or more of CTLA-4, PDL1, PDL2, PD1, B7-H3, B7-H4, BTLA, HVEM, TIM3, GAL9, LAG3, TIM3, B7H3, B7H4, VISTA, KIR, 2B4, CD160, and CGEN-15049. Illustrative immune checkpoint inhibitors include Tremelimumab (CTLA-4 blocking antibody), anti-OX40, PD-L1 monoclonal Antibody (Anti-B7-H1; MEDI4736), ipilimumab, MK-3475 (PD-1 blocker), Nivolumamb (anti-PD1 antibody), CT-011 (anti-PD1 antibody), BY55 monoclonal antibody, AMP224 (anti-PDL1 antibody), BMS-936559 (anti-PDL1 antibody), MPLDL3280A (anti-PDL1 antibody), MSB0010718C (anti-PDL1 antibody) and Yervoy/ipilimumab (anti-CTLA-4 checkpoint inhibitor). Antibody-encoding sequences can be engineered into vectors such as C68 using ordinary skill in the art. An exemplary method is described in Fang et al., Stable antibody expression at therapeutic levels using the 2A peptide. Nat Biotechnol. 2005 May; 23(5):584-90. Epub 2005 Apr. 17; herein incorporated by reference for all purposes.

[0299] Immune modulators (e.g., checkpoint inhibitor antibodies such as anti-CTLA4 antibodies or anti-PD1 antibodies) encoded in the same vector system as the antigen encoding cassette can also be encoded such that the nucleic acid sequence encoding the immune modulator is transcribed as part of the same transcript as the antigen-encoding nucleic acid sequence(s). Additional elements can be incorporated into the nucleic acid sequence cassette that allow for translation of both the antigens and the immune modulator. For example, an internal ribosome entry sequence (IRES) sequence can be used to separate sequences encoding antigens and immune modulator(s), allowing separate translation of the antigens and the immune modulator(s). In another example, a sequence encoding a self-cleaving 2A peptide can be incorporated between antigens and immune modulator(s), allowing translation of both the antigens and the immune modulator(s) as part of the same protein, followed by cleavage of the 2A peptide; resulting in separate proteins for the antigens and the immune modulator(s). These examples are not meant to be limiting, and it is also understood that multiple elements can be combined to facilitate co-expression of both antigens and immune modulator(s), such as use of both an IRES sequence and a 2A peptide encoding sequence. Additionally, a Furin cleavage site encoding sequence can be incorporated 5′ of the 2A peptide encoding sequence. The Furin cleavage site allows for removal of the 2A peptide residues following self-cleavage.

[0300] In examples where antigens and immune modulator(s) are encoded on the same transcript, the order of the antigens and the immune modulator can be in any order. For example, in the case of using an IRES sequence to separate the antigens and the immune modulator, the order, from 5′ to 3′; can either be in an antigen-RES-immune modulator orientation, or in a immune modulator-IRES-antigen orientation.

[0301] In addition, immune modulators encoded in the same vector system as the antigen encoding cassette can also be encoded such that the nucleic acid sequence encoding the immune modulator is transcribed on a different transcript from the antigen-encoding nucleic acid sequence(s). For example, separate promoters can be incorporated to independently drive transcription of the immune modulator and the antigen-encoding nucleic acid sequence(s). The separate promoters can be the same or different promoters, and each can be an inducible or constitutive promoter. Exemplary promoter sequences include, but are not limited to, CMV, SV40, EF-1, RSV, PGK, MCK, HSA, and EBV promoter sequences. In another example, the antigen encoding cassette and the nucleic acid sequence encoding the immune modulator can be inserted into different regions, including deleted regions, of the same viral vector such that each are independently transcribed. In one example, a vector is designed with an expression cassette introduced into the deleted E1 region and the immune checkpoint inhibitor is introduced into the deleted E3 region in an E1/E3 deleted ChAdV68 viral vector.

[0302] V.C. Additional Considerations for Vaccine Design and Manufacture

[0303] V.C.1. Determination of a Set of Peptides that Cover all Tumor Subclones

[0304] Truncal peptides, meaning those presented by all or most tumor subclones, can be prioritized for inclusion into the vaccine.⁵³ Optionally, if there are no truncal peptides predicted to be presented and immunogenic with high probability, or if the number of truncal peptides predicted to be presented and immunogenic with high probability is small enough that additional non-truncal peptides can be included in the vaccine, then further peptides can be prioritized by estimating the number and identity of tumor subclones and choosing peptides so as to maximize the number of tumor subclones covered by the vaccine.⁵⁴

[0305] V.C.2. Antigen Prioritization

[0306] After all of the above antigen filters are applied, more candidate antigens may still be available for vaccine inclusion than the vaccine technology can support. Additionally, uncertainty about various aspects of the antigen analysis may remain and tradeoffs may exist between different properties of candidate vaccine antigens. Thus, in place of predetermined filters at each step of the selection process, an integrated multi-dimensional model can be considered that places candidate antigens in a space with at least the following axes and optimizes selection using an integrative approach.
[0307] 1. Risk of auto-immunity or tolerance (risk of germline) (lower risk of auto-immunity is typically preferred)
[0308] 2. Probability of sequencing artifact (lower probability of artifact is typically preferred)
[0309] 3. Probability of immunogenicity (higher probability of immunogenicity is typically preferred)
[0310] 4. Probability of presentation (higher probability of presentation is typically preferred)
[0311] 5. Gene expression (higher expression is typically preferred)
[0312] 6. Coverage of HLA genes (larger number of HLA molecules involved in the presentation of a set of antigens may lower the probability that a tumor will escape immune attack via downregulation or mutation of HLA molecules)
[0313] 7. Coverage of HLA classes (covering both HLA-I and HLA-II may increase the probability of therapeutic response and decrease the probability of tumor escape)

[0314] Additionally, optionally, antigens can be deprioritized (e.g., excluded) from the vaccination if they are predicted to be presented by HLA alleles lost or inactivated in either all or part of the patient's tumor. HLA allele loss can occur by either somatic mutation, loss of heterozygosity, or homozygous deletion of the locus. Methods for detection of HLA allele somatic mutation are well known in the art, e.g. (Shukla et al., 2015). Methods for detection of somatic LOH and homozygous deletion (including for HLA locus) are likewise well described. (Carter et al., 2012; McGranahan et al., 2017; Van Loo et al., 2010). Antigens can also be deprioritized if mass-spectrometry data indicates a predicted antigen is not presented by a predicted HLA allele.

[0315] V.D. Alphavirus

[0316] V.D.1. Alphavirus Biology

[0317] Alphaviruses are members of the family Togaviridae, and are positive-sense single stranded RNA viruses. Members are typically classified as either Old World, such as Sindbis, Ross River, Mayaro, Chikungunya, and Semliki Forest viruses, or New World, such as eastern equine encephalitis, Aura, Fort Morgan, or Venezuelan equine encephalitis virus and its derivative strain TC-83 (Strauss Microbrial Review 1994). A natural alphavirus genome is typically around 12 kb in length, the first two-thirds of which contain genes encoding non-structural proteins (nsPs) that form RNA replication complexes for self-replication of the viral genome, and the last third of which contains a subgenomic expression cassette encoding structural proteins for virion production (Frolov RNA 2001).

[0318] A model lifecycle of an alphavirus involves several distinct steps (Strauss Microbrial Review 1994, Jose Future Microbiol 2009). Following virus attachment to a host cell, the virion fuses with membranes within endocytic compartments resulting in the eventual release of genomic RNA into the cytosol. The genomic RNA, which is in a plus-strand orientation and comprises a 5′ methylguanylate cap and 3′ polyA tail, is translated to produce non-structural proteins nsP1-4 that form the replication complex. Early in infection, the plus-strand is then replicated by the complex into a minus-stand template. In the current model, the replication complex is further processed as infection progresses, with the resulting processed complex switching to transcription of the minus-strand into both full-length positive-strand genomic RNA, as well as the 26S subgenomic positive-strand RNA containing the structural genes. Several conserved sequence elements (CSEs) of alphavirus have been identified to potentially play a role in the various RNA replication steps including; a complement of the 5′ UTR in the replication of plus-strand RNAs from a minus-strand template, a 51-nt CSE in the replication of minus-strand synthesis from the genomic template, a 24-nt CSE in the junction region between the nsPs and the 26S RNA in the transcription of the subgenomic RNA from the minus-strand, and a 3′ 19-nt CSE in minus-strand synthesis from the plus-strand template.

[0319] Following the replication of the various RNA species, virus particles are then typically assembled in the natural lifecycle of the virus. The 26S RNA is translated and the resulting proteins further processed to produce the structural proteins including capsid protein, glycoproteins E1 and E2, and two small polypeptides E3 and 6K (Strauss 1994). Encapsidation of viral RNA occurs, with capsid proteins normally specific for only genomic RNA being packaged, followed by virion assembly and budding at the membrane surface.

[0320] V.D.2. Alphavirus as a Delivery Vector

[0321] Alphaviruses (including alphavirus sequences, features, and other elements) can be used to generate alphavirus-based delivery vectors (also be referred to as alphavirus vectors, alphavirus viral vectors, alphavirus vaccine vectors, self-replicating RNA (srRNA) vectors, or self-amplifying RNA (samRNA) vectors). Alphaviruses have previously been engineered for use as expression vector systems (Pushko 1997, Rheme 2004). Alphaviruses offer several advantages, particularly in a vaccine setting where heterologous antigen expression can be desired. Due to its ability to self-replicate in the host cytosol, alphavirus vectors are generally able to produce high copy numbers of the expression cassette within a cell resulting in a high level of heterologous antigen production. Additionally, the vectors are generally transient, resulting in improved biosafety as well as reduced induction of immunological tolerance to the vector. The public, in general, also lacks pre-existing immunity to alphavirus vectors as compared to other standard viral vectors, such as human adenovirus. Alphavirus based vectors also generally result in cytotoxic responses to infected cells. Cytotoxicity, to a certain degree, can be important in a vaccine setting to properly illicit an immune response to the heterologous antigen expressed. However, the degree of desired cytotoxicity can be a balancing act, and thus several attenuated alphaviruses have been developed, including the TC-83 strain of VEE. Thus, an example of a antigen expression vector described herein can utilize an alphavirus backbone that allows for a high level of antigen expression, elicits a robust immune response to antigen, does not elicit an immune response to the vector itself, and can be used in a safe manner. Furthermore, the antigen expression cassette can be designed to elicit different levels of an immune response through optimization of which alphavirus sequences the vector uses, including, but not limited to, sequences derived from VEE or its attenuated derivative TC-83.

[0322] Several expression vector design strategies have been engineered using alphavirus sequences (Pushko 1997). In one strategy, a alphavirus vector design includes inserting a second copy of the 26S promoter sequence elements downstream of the structural protein genes, followed by a heterologous gene (Frolov 1993). Thus, in addition to the natural non-structural and structural proteins, an additional subgenomic RNA is produced that expresses the heterologous protein. In this system, all the elements for production of infectious virions are present and, therefore, repeated rounds of infection of the expression vector in non-infected cells can occur.

[0323] Another expression vector design makes use of helper virus systems (Pushko 1997). In this strategy, the structural proteins are replaced by a heterologous gene. Thus, following self-replication of viral RNA mediated by still intact non-structural genes, the 26S subgenomic RNA provides for expression of the heterologous protein. Traditionally, additional vectors that expresses the structural proteins are then supplied in trans, such as by co-transfection of a cell line, to produce infectious virus. A system is described in detail in U.S. Pat. No. 8,093,021, which is herein incorporated by reference in its entirety, for all purposes. The helper vector system provides the benefit of limiting the possibility of forming infectious particles and, therefore, improves biosafety. In addition, the helper vector system reduces the total vector length, potentially improving the replication and expression efficiency. Thus, an example of a antigen expression vector described herein can utilize an alphavirus backbone wherein the structural proteins are replaced by a antigen cassette, the resulting vector both reducing biosafety concerns, while at the same time promoting efficient expression due to the reduction in overall expression vector size.

[0324] V.D.3. Alphavirus production in vitro

[0325] Alphavirus delivery vectors are generally positive-sense RNA polynucleotides. A convenient technique well-known in the art for RNA production is in vitro transcription IVT. In this technique, a DNA template of the desired vector is first produced by techniques well-known to those in the art, including standard molecular biology techniques such as cloning, restriction digestion, ligation, gene synthesis, and polymerase chain reaction (PCR). The DNA template contains a RNA polymerase promoter at the 5′ end of the sequence desired to be transcribed into RNA. Promoters include, but are not limited to, bacteriophage polymerase promoters such as T3, T7, or SP6. The DNA template is then incubated with the appropriate RNA polymerase enzyme, buffer agents, and nucleotides (NTPs). The resulting RNA polynucleotide can optionally be further modified including, but limited to, addition of a 5′ cap structure such as 7-methylguanosine or a related structure, and optionally modifying the 3′ end to include a polyadenylate (polyA) tail. The RNA can then be purified using techniques well-known in the field, such as phenol-chloroform extraction.

[0326] V.D.4. Delivery Via Lipid Nanoparticle

[0327] An important aspect to consider in vaccine vector design is immunity against the vector itself (Riley 2017). This may be in the form of preexisting immunity to the vector itself, such as with certain human adenovirus systems, or in the form of developing immunity to the vector following administration of the vaccine. The latter is an important consideration if multiple administrations of the same vaccine are performed, such as separate priming and boosting doses, or if the same vaccine vector system is to be used to deliver different antigen cassettes.

[0328] In the case of alphavirus vectors, the standard delivery method is the previously discussed helper virus system that provides capsid, E1, and E2 proteins in trans to produce infectious viral particles. However, it is important to note that the E1 and E2 proteins are often major targets of neutralizing antibodies (Strauss 1994). Thus, the efficacy of using alphavirus vectors to deliver antigens of interest to target cells may be reduced if infectious particles are targeted by neutralizing antibodies.

[0329] An alternative to viral particle mediated gene delivery is the use of nanomaterials to deliver expression vectors (Riley 2017). Nanomaterial vehicles, importantly, can be made of non-immunogenic materials and generally avoid eliciting immunity to the delivery vector itself. These materials can include, but are not limited to, lipids, inorganic nanomaterials, and other polymeric materials. Lipids can be cationic, anionic, or neutral. The materials can be synthetic or naturally derived, and in some instances biodegradable. Lipids can include fats, cholesterol, phospholipids, lipid conjugates including, but not limited to, polyethyleneglycol (PEG) conjugates (PEGylated lipids), waxes, oils, glycerides, and fat soulable vitamins.

[0330] Lipid nanoparticles (LNPs) are an attractive delivery system due to the amphiphilic nature of lipids enabling formation of membranes and vesicle like structures (Riley 2017). In general, these vesicles deliver the expression vector by absorbing into the membrane of target cells and releasing nucleic acid into the cytosol. In addition, LNPs can be further modified or functionalized to facilitate targeting of specific cell types. Another consideration in LNP design is the balance between targeting efficiency and cytotoxicity. Lipid compositions generally include defined mixtures of cationic, neutral, anionic, and amphipathic lipids. In some instances, specific lipids are included to prevent LNP aggregation, prevent lipid oxidation, or provide functional chemical groups that facilitate attachment of additional moieties. Lipid composition can influence overall LNP size and stability. In an example, the lipid composition comprises dilinoleylmethyl-4-dimethylaminobutyrate (MC3) or MC3-like molecules. MC3 and MC3-like lipid compositions can be formulated to include one or more other lipids, such as a PEG or PEG-conjugated lipid, a sterol, or neutral lipids.

[0331] Nucleic-acid vectors, such as expression vectors, exposed directly to serum can have several undesirable consequences, including degradation of the nucleic acid by serum nucleases or off-target stimulation of the immune system by the free nucleic acids. Therefore, encapsulation of the alphavirus vector can be used to avoid degradation, while also avoiding potential off-target affects. In certain examples, an alphavirus vector is fully encapsulated within the delivery vehicle, such as within the aqueous interior of an LNP. Encapsulation of the alphavirus vector within an LNP can be carried out by techniques well-known to those skilled in the art, such as microfluidic mixing and droplet generation carried out on a microfluidic droplet generating device. Such devices include, but are not limited to, standard T-junction devices or flow-focusing devices. In an example, the desired lipid formulation, such as MC3 or MC3-like containing compositions, is provided to the droplet generating device in parallel with the alphavirus delivery vector and other desired agents, such that the delivery vector and desired agents are fully encapsulated within the interior of the MC3 or MC3-like based LNP. In an example, the droplet generating device can control the size range and size distribution of the LNPs produced. For example, the LNP can have a size ranging from 1 to 1000 nanometers in diameter, e.g., 1, 10, 50, 100, 500, or 1000 nanometers. Following droplet generation, the delivery vehicles encapsulating the expression vectors can be further treated or modified to prepare them for administration.

[0332] V.E. Chimpanzee Adenovirus (ChAd)

[0333] V.E.1. Viral Delivery with Chimpanzee Adenovirus

[0334] Vaccine compositions for delivery of one or more antigens (e.g., via a antigen cassette and including one or more neoantigens) can be created by providing adenovirus nucleotide sequences of chimpanzee origin, a variety of novel vectors, and cell lines expressing chimpanzee adenovirus genes. A nucleotide sequence of a chimpanzee C68 adenovirus (also referred to herein as ChAdV68) can be used in a vaccine composition for antigen delivery (See SEQ ID NO: 1). Use of C68 adenovirus derived vectors is described in further detail in U.S. Pat. No. 6,083,716, which is herein incorporated by reference in its entirety, for all purposes.

[0335] In a further aspect, provided herein is a recombinant adenovirus comprising the DNA sequence of a chimpanzee adenovirus such as C68 and a antigen cassette operatively linked to regulatory sequences directing its expression. The recombinant virus is capable of infecting a mammalian, preferably a human, cell and capable of expressing the antigen cassette product in the cell. In this vector, the native chimpanzee E1 gene, and/or E3 gene, and/or E4 gene can be deleted. A antigen cassette can be inserted into any of these sites of gene deletion. The antigen cassette can include a antigen against which a primed immune response is desired.

[0336] In another aspect, provided herein is a mammalian cell infected with a chimpanzee adenovirus such as C68.

[0337] In still a further aspect, a novel mammalian cell line is provided which expresses a chimpanzee adenovirus gene (e.g., from C68) or functional fragment thereof.

[0338] In still a further aspect, provided herein is a method for delivering a antigen cassette into a mammalian cell comprising the step of introducing into the cell an effective amount of a chimpanzee adenovirus, such as C68, that has been engineered to express the antigen cassette.

[0339] Still another aspect provides a method for eliciting an immune response in a mammalian host to treat cancer. The method can comprise the step of administering to the host an effective amount of a recombinant chimpanzee adenovirus, such as C68, comprising a antigen cassette that encodes one or more antigens from the tumor against which the immune response is targeted.

[0340] Also disclosed is a non-simian mammalian cell that expresses a chimpanzee adenovirus gene obtained from the sequence of SEQ ID NO: 1. The gene can be selected from the group consisting of the adenovirus E1A, E1B, E2A, E2B, E3, E4, L1, L2, L3, L4 and L5 of SEQ ID NO: 1.

[0341] Also disclosed is a nucleic acid molecule comprising a chimpanzee adenovirus DNA sequence comprising a gene obtained from the sequence of SEQ ID NO: 1. The gene can be selected from the group consisting of said chimpanzee adenovirus E1A, E1B, E2A, E2B, E3, E4, L1, L2, L3, L4 and L5 genes of SEQ ID NO: 1. In some aspects the nucleic acid molecule comprises SEQ ID NO: 1. In some aspects the nucleic acid molecule comprises the sequence of SEQ ID NO: 1, lacking at least one gene selected from the group consisting of E1A, E1B, E2A, E2B, E3, E4, L1, L2, L3, L4 and L5 genes of SEQ ID NO: 1.

[0342] Also disclosed is a vector comprising a chimpanzee adenovirus DNA sequence obtained from SEQ ID NO: 1 and a antigen cassette operatively linked to one or more regulatory sequences which direct expression of the cassette in a heterologous host cell, optionally wherein the chimpanzee adenovirus DNA sequence comprises at least the cis-elements necessary for replication and virion encapsidation, the cis-elements flanking the antigen cassette and regulatory sequences. In some aspects, the chimpanzee adenovirus DNA sequence comprises a gene selected from the group consisting of E1A, E1B, E2A, E2B, E3, E4, L1, L2, L3, L4 and L5 gene sequences of SEQ ID NO: 1. In some aspects the vector can lack the E1A and/or EB gene.

[0343] Also disclosed herein is a host cell transfected with a vector disclosed herein such as a C68 vector engineered to expression a antigen cassette. Also disclosed herein is a human cell that expresses a selected gene introduced therein through introduction of a vector disclosed herein into the cell.

[0344] Also disclosed herein is a method for delivering a antigen cassette to a mammalian cell comprising introducing into said cell an effective amount of a vector disclosed herein such as a C68 vector engineered to expression the antigen cassette.

[0345] Also disclosed herein is a method for producing a antigen comprising introducing a vector disclosed herein into a mammalian cell, culturing the cell under suitable conditions and producing the antigen.

[0346] V.E.2. E1-Expressing Complementation Cell Lines

[0347] To generate recombinant chimpanzee adenoviruses (Ad) deleted in any of the genes described herein, the function of the deleted gene region, if essential to the replication and infectivity of the virus, can be supplied to the recombinant virus by a helper virus or cell line, i.e., a complementation or packaging cell line. For example, to generate a replication-defective chimpanzee adenovirus vector, a cell line can be used which expresses the E1 gene products of the human or chimpanzee adenovirus; such a cell line can include HEK293 or variants thereof. The protocol for the generation of the cell lines expressing the chimpanzee E1 gene products (Examples 3 and 4 of U.S. Pat. No. 6,083,716) can be followed to generate a cell line which expresses any selected chimpanzee adenovirus gene.

[0348] An AAV augmentation assay can be used to identify a chimpanzee adenovirus E1-expressing cell line. This assay is useful to identify E1 function in cell lines made by using the E1 genes of other uncharacterized adenoviruses, e.g., from other species. That assay is described in Example 4B of U.S. Pat. No. 6,083,716.

[0349] A selected chimpanzee adenovirus gene, e.g., E1, can be under the transcriptional control of a promoter for expression in a selected parent cell line. Inducible or constitutive promoters can be employed for this purpose. Among inducible promoters are included the sheep metallothionine promoter, inducible by zinc, or the mouse mammary tumor virus (MMTV) promoter, inducible by a glucocorticoid, particularly, dexamethasone. Other inducible promoters, such as those identified in International patent application WO95/13392, incorporated by reference herein can also be used in the production of packaging cell lines. Constitutive promoters in control of the expression of the chimpanzee adenovirus gene can be employed also.

[0350] A parent cell can be selected for the generation of a novel cell line expressing any desired C68 gene. Without limitation, such a parent cell line can be HeLa [ATCC Accession No. CCL 2], A549 [ATCC Accession No. CCL 185], KB [CCL 17], Detroit [e.g., Detroit 510, CCL 72] and WI-38 [CCL 75] cells. Other suitable parent cell lines can be obtained from other sources. Parent cell lines can include CHO, HEK293 or variants thereof, 911, HeLa, A549, LP-293, PER.C6, or AE1-2a.

[0351] An E1-expressing cell line can be useful in the generation of recombinant chimpanzee adenovirus E1 deleted vectors. Cell lines constructed using essentially the same procedures that express one or more other chimpanzee adenoviral gene products are useful in the generation of recombinant chimpanzee adenovirus vectors deleted in the genes that encode those products. Further, cell lines which express other human Ad E1 gene products are also useful in generating chimpanzee recombinant Ads.

[0352] V.E.3. Recombinant Viral Particles as Vectors

[0353] The compositions disclosed herein can comprise viral vectors, that deliver at least one antigen to cells. Such vectors comprise a chimpanzee adenovirus DNA sequence such as C68 and a antigen cassette operatively linked to regulatory sequences which direct expression of the cassette. The C68 vector is capable of expressing the cassette in an infected mammalian cell. The C68 vector can be functionally deleted in one or more viral genes. A antigen cassette comprises at least one antigen under the control of one or more regulatory sequences such as a promoter. Optional helper viruses and/or packaging cell lines can supply to the chimpanzee viral vector any necessary products of deleted adenoviral genes.

[0354] The term “functionally deleted” means that a sufficient amount of the gene region is removed or otherwise altered, e.g., by mutation or modification, so that the gene region is no longer capable of producing one or more functional products of gene expression. Mutations or modifications that can result in functional deletions include, but are not limited to, nonsense mutations such as introduction of premature stop codons and removal of canonical and non-canonical start codons, mutations that alter mRNA splicing or other transcriptional processing, or combinations thereof. If desired, the entire gene region can be removed.

[0355] Modifications of the nucleic acid sequences forming the vectors disclosed herein, including sequence deletions, insertions, and other mutations may be generated using standard molecular biological techniques and are within the scope of this invention.

[0356] V.E.4. Construction of The Viral Plasmid Vector

[0357] The chimpanzee adenovirus C68 vectors useful in this invention include recombinant, defective adenoviruses, that is, chimpanzee adenovirus sequences functionally deleted in the Ela or E1b genes, and optionally bearing other mutations, e.g., temperature-sensitive mutations or deletions in other genes. It is anticipated that these chimpanzee sequences are also useful in forming hybrid vectors from other adenovirus and/or adeno-associated virus sequences. Homologous adenovirus vectors prepared from human adenoviruses are described in the published literature [see, for example, Kozarsky I and II, cited above, and references cited therein, U.S. Pat. No. 5,240,846].

[0358] In the construction of useful chimpanzee adenovirus C68 vectors for delivery of a antigen cassette to a human (or other mammalian) cell, a range of adenovirus nucleic acid sequences can be employed in the vectors. A vector comprising minimal chimpanzee C68 adenovirus sequences can be used in conjunction with a helper virus to produce an infectious recombinant virus particle. The helper virus provides essential gene products required for viral infectivity and propagation of the minimal chimpanzee adenoviral vector. When only one or more selected deletions of chimpanzee adenovirus genes are made in an otherwise functional viral vector, the deleted gene products can be supplied in the viral vector production process by propagating the virus in a selected packaging cell line that provides the deleted gene functions in trans.

[0359] V.E.5. Recombinant Minimal Adenovirus

[0360] A minimal chimpanzee Ad C68 virus is a viral particle containing just the adenovirus cis-elements necessary for replication and virion encapsidation. That is, the vector contains the cis-acting 5′ and 3′ inverted terminal repeat (ITR) sequences of the adenoviruses (which function as origins of replication) and the native 5′ packaging/enhancer domains (that contain sequences necessary for packaging linear Ad genomes and enhancer elements for the E1 promoter). See, for example, the techniques described for preparation of a “minimal” human Ad vector in International Patent Application WO96/13597 and incorporated herein by reference.

[0361] V.E.6. Other Defective Adenoviruses

[0362] Recombinant, replication-deficient adenoviruses can also contain more than the minimal chimpanzee adenovirus sequences. These other Ad vectors can be characterized by deletions of various portions of gene regions of the virus, and infectious virus particles formed by the optional use of helper viruses and/or packaging cell lines.

[0363] As one example, suitable vectors may be formed by deleting all or a sufficient portion of the C68 adenoviral immediate early gene E1a and delayed early gene E1b, so as to eliminate their normal biological functions. Replication-defective E1-deleted viruses are capable of replicating and producing infectious virus when grown on a chimpanzee adenovirus-transformed, complementation cell line containing functional adenovirus E1a and E1b genes which provide the corresponding gene products in trans. Based on the homologies to known adenovirus sequences, it is anticipated that, as is true for the human recombinant E1-deleted adenoviruses of the art, the resulting recombinant chimpanzee adenovirus is capable of infecting many cell types and can express antigen(s), but cannot replicate in most cells that do not carry the chimpanzee E1 region DNA unless the cell is infected at a very high multiplicity of infection.

[0364] As another example, all or a portion of the C68 adenovirus delayed early gene E3 can be eliminated from the chimpanzee adenovirus sequence which forms a part of the recombinant virus.

[0365] Chimpanzee adenovirus C68 vectors can also be constructed having a deletion of the E4 gene. Still another vector can contain a deletion in the delayed early gene E2a.

[0366] Deletions can also be made in any of the late genes L1 through L5 of the chimpanzee C68 adenovirus genome. Similarly, deletions in the intermediate genes IX and IVa2 can be useful for some purposes. Other deletions may be made in the other structural or non-structural adenovirus genes.

[0367] The above discussed deletions can be used individually, i.e., an adenovirus sequence can contain deletions of E1 only. Alternatively, deletions of entire genes or portions thereof effective to destroy or reduce their biological activity can be used in any combination. For example, in one exemplary vector, the adenovirus C68 sequence can have deletions of the E1 genes and the E4 gene, or of the E1, E2a and E3 genes, or of the E1 and E3 genes, or of E1, E2a and E4 genes, with or without deletion of E3, and so on. As discussed above, such deletions can be used in combination with other mutations, such as temperature-sensitive mutations, to achieve a desired result.

[0368] The cassette comprising antigen(s) be inserted optionally into any deleted region of the chimpanzee C68 Ad virus. Alternatively, the cassette can be inserted into an existing gene region to disrupt the function of that region, if desired.

[0369] V.E.7. Helper Viruses

[0370] Depending upon the chimpanzee adenovirus gene content of the viral vectors employed to carry the antigen cassette, a helper adenovirus or non-replicating virus fragment can be used to provide sufficient chimpanzee adenovirus gene sequences to produce an infective recombinant viral particle containing the cassette.

[0371] Useful helper viruses contain selected adenovirus gene sequences not present in the adenovirus vector construct and/or not expressed by the packaging cell line in which the vector is transfected. A helper virus can be replication-defective and contain a variety of adenovirus genes in addition to the sequences described above. The helper virus can be used in combination with the E1-expressing cell lines described herein.

[0372] For C68, the “helper” virus can be a fragment formed by clipping the C terminal end of the C68 genome with SspI, which removes about 1300 bp from the left end of the virus. This clipped virus is then co-transfected into an E1-expressing cell line with the plasmid DNA, thereby forming the recombinant virus by homologous recombination with the C68 sequences in the plasmid.

[0373] Helper viruses can also be formed into poly-cation conjugates as described in Wu et al, J. Biol. Chem., 264:16985-16987 (1989); K. J. Fisher and J. M. Wilson, Biochem. J., 299:49 (Apr. 1, 1994). Helper virus can optionally contain a reporter gene. A number of such reporter genes are known to the art. The presence of a reporter gene on the helper virus which is different from the antigen cassette on the adenovirus vector allows both the Ad vector and the helper virus to be independently monitored. This second reporter is used to enable separation between the resulting recombinant virus and the helper virus upon purification.

[0374] V.E.8. Assembly of Viral Particle and Infection of a Cell Line

[0375] Assembly of the selected DNA sequences of the adenovirus, the antigen cassette, and other vector elements into various intermediate plasmids and shuttle vectors, and the use of the plasmids and vectors to produce a recombinant viral particle can all be achieved using conventional techniques. Such techniques include conventional cloning techniques of cDNA, in vitro recombination techniques (e.g., Gibson assembly), use of overlapping oligonucleotide sequences of the adenovirus genomes, polymerase chain reaction, and any suitable method which provides the desired nucleotide sequence. Standard transfection and co-transfection techniques are employed, e.g., CaPO4 precipitation techniques or liposome-mediated transfection methods such as lipofectamine. Other conventional methods employed include homologous recombination of the viral genomes, plaquing of viruses in agar overlay, methods of measuring signal generation, and the like.

[0376] For example, following the construction and assembly of the desired antigen cassette-containing viral vector, the vector can be transfected in vitro in the presence of a helper virus into the packaging cell line. Homologous recombination occurs between the helper and the vector sequences, which permits the adenovirus-antigen sequences in the vector to be replicated and packaged into virion capsids, resulting in the recombinant viral vector particles.

[0377] The resulting recombinant chimpanzee C68 adenoviruses are useful in transferring a antigen cassette to a selected cell. In in vivo experiments with the recombinant virus grown in the packaging cell lines, the E1-deleted recombinant chimpanzee adenovirus demonstrates utility in transferring a cassette to a non-chimpanzee, preferably a human, cell.

[0378] V.E.9. Use of the Recombinant Virus Vectors

[0379] The resulting recombinant chimpanzee C68 adenovirus containing the antigen cassette (produced by cooperation of the adenovirus vector and helper virus or adenoviral vector and packaging cell line, as described above) thus provides an efficient gene transfer vehicle which can deliver antigen(s) to a subject in vivo or ex vivo.

[0380] The above-described recombinant vectors are administered to humans according to published methods for gene therapy. A chimpanzee viral vector bearing a antigen cassette can be administered to a patient, preferably suspended in a biologically compatible solution or pharmaceutically acceptable delivery vehicle. A suitable vehicle includes sterile saline. Other aqueous and non-aqueous isotonic sterile injection solutions and aqueous and non-aqueous sterile suspensions known to be pharmaceutically acceptable carriers and well known to those of skill in the art may be employed for this purpose.

[0381] The chimpanzee adenoviral vectors are administered in sufficient amounts to transduce the human cells and to provide sufficient levels of antigen transfer and expression to provide a therapeutic benefit without undue adverse or with medically acceptable physiological effects, which can be determined by those skilled in the medical arts. Conventional and pharmaceutically acceptable routes of administration include, but are not limited to, direct delivery to the liver, intranasal, intravenous, intramuscular, subcutaneous, intradermal, oral and other parental routes of administration. Routes of administration may be combined, if desired.

[0382] Dosages of the viral vector will depend primarily on factors such as the condition being treated, the age, weight and health of the patient, and may thus vary among patients. The dosage will be adjusted to balance the therapeutic benefit against any side effects and such dosages may vary depending upon the therapeutic application for which the recombinant vector is employed. The levels of expression of antigen(s) can be monitored to determine the frequency of dosage administration.

[0383] Recombinant, replication defective adenoviruses can be administered in a “pharmaceutically effective amount”, that is, an amount of recombinant adenovirus that is effective in a route of administration to transfect the desired cells and provide sufficient levels of expression of the selected gene to provide a vaccinal benefit, i.e., some measurable level of protective immunity. C68 vectors comprising a antigen cassette can be co-administered with adjuvant. Adjuvant can be separate from the vector (e.g., alum) or encoded within the vector, in particular if the adjuvant is a protein. Adjuvants are well known in the art.

[0384] Conventional and pharmaceutically acceptable routes of administration include, but are not limited to, intranasal, intramuscular, intratracheal, subcutaneous, intradermal, rectal, oral and other parental routes of administration. Routes of administration may be combined, if desired, or adjusted depending upon the immunogen or the disease. For example, in prophylaxis of rabies, the subcutaneous, intratracheal and intranasal routes are preferred. The route of administration primarily will depend on the nature of the disease being treated.

[0385] The levels of immunity to antigen(s) can be monitored to determine the need, if any, for boosters. Following an assessment of antibody titers in the serum, for example, optional booster immunizations may be desired

### VI. Therapeutic and Manufacturing Methods

[0386] Also provided is a method of inducing a tumor specific immune response in a subject, vaccinating against a tumor, treating and or alleviating a symptom of cancer in a subject by administering to the subject one or more antigens such as a plurality of antigens identified using methods disclosed herein.

[0387] In some aspects, a subject has been diagnosed with cancer or is at risk of developing cancer. A subject can be a human, dog, cat, horse or any animal in which a tumor specific immune response is desired. A tumor can be any solid tumor such as breast, ovarian, prostate, lung, kidney, gastric, colon, testicular, head and neck, pancreas, brain, melanoma, and other tumors of tissue organs and hematological tumors, such as lymphomas and leukemias, including acute myelogenous leukemia, chronic myelogenous leukemia, chronic lymphocytic leukemia, T cell lymphocytic leukemia, and B cell lymphomas.

[0388] A antigen can be administered in an amount sufficient to induce a CTL response.

[0389] A antigen can be administered alone or in combination with other therapeutic agents. The therapeutic agent is for example, a chemotherapeutic agent, radiation, or immunotherapy. Any suitable therapeutic treatment for a particular cancer can be administered.

[0390] In addition, a subject can be further administered an anti-immunosuppressive/immunostimulatory agent such as a checkpoint inhibitor. For example, the subject can be further administered an anti-CTLA antibody or anti-PD-1 or anti-PD-L1. Blockade of CTLA-4 or PD-L1 by antibodies can enhance the immune response to cancerous cells in the patient. In particular, CTLA-4 blockade has been shown effective when following a vaccination protocol.

[0391] The optimum amount of each antigen to be included in a vaccine composition and the optimum dosing regimen can be determined. For example, a antigen or its variant can be prepared for intravenous (i.v.) injection, sub-cutaneous (s.c.) injection, intradermal (i.d.) injection, intraperitoneal (i.p.) injection, intramuscular (i.m.) injection. Methods of injection include s.c., i.d., i.p., i.m., and i.v. Methods of DNA or RNA injection include i.d., i.m., s.c., i.p. and i.v. Other methods of administration of the vaccine composition are known to those skilled in the art.

[0392] A vaccine can be compiled so that the selection, number and/or amount of antigens present in the composition is/are tissue, cancer, and/or patient-specific. For instance, the exact selection of peptides can be guided by expression patterns of the parent proteins in a given tissue or guided by mutation status of a patient. The selection can be dependent on the specific type of cancer, the status of the disease, earlier treatment regimens, the immune status of the patient, and, of course, the HLA-haplotype of the patient. Furthermore, a vaccine can contain individualized components, according to personal needs of the particular patient. Examples include varying the selection of antigens according to the expression of the antigen in the particular patient or adjustments for secondary treatments following a first round or scheme of treatment.

[0393] A patient can be identified for administration of an antigen vaccine through the use of various diagnostic methods, e.g., patient selection methods described further below. Patient selection can involve identifying mutations in, or expression patterns of, one or more genes. In some cases, patient selection involves identifying the haplotype of the patient. The various patient selection methods can be performed in parallel, e.g., a sequencing diagnostic can identify both the mutations and the haplotype of a patient. The various patient selection methods can be performed sequentially, e.g., one diagnostic test identifies the mutations and separate diagnostic test identifies the haplotype of a patient, and where each test can be the same (e.g., both high-throughput sequencing) or different (e.g., one high-throughput sequencing and the other Sanger sequencing) diagnostic methods.

[0394] For a composition to be used as a vaccine for cancer, antigens with similar normal self-peptides that are expressed in high amounts in normal tissues can be avoided or be present in low amounts in a composition described herein. On the other hand, if it is known that the tumor of a patient expresses high amounts of a certain antigen, the respective pharmaceutical composition for treatment of this cancer can be present in high amounts and/or more than one antigen specific for this particularly antigen or pathway of this antigen can be included.

[0395] Compositions comprising a antigen can be administered to an individual already suffering from cancer. In therapeutic applications, compositions are administered to a patient in an amount sufficient to elicit an effective CTL response to the tumor antigen and to cure or at least partially arrest symptoms and/or complications. An amount adequate to accomplish this is defined as “therapeutically effective dose.” Amounts effective for this use will depend on, e.g., the composition, the manner of administration, the stage and severity of the disease being treated, the weight and general state of health of the patient, and the judgment of the prescribing physician. It should be kept in mind that compositions can generally be employed in serious disease states, that is, life-threatening or potentially life threatening situations, especially when the cancer has metastasized. In such cases, in view of the minimization of extraneous substances and the relative nontoxic nature of a antigen, it is possible and can be felt desirable by the treating physician to administer substantial excesses of these compositions.

[0396] For therapeutic use, administration can begin at the detection or surgical removal of tumors. This is followed by boosting doses until at least symptoms are substantially abated and for a period thereafter.

[0397] The pharmaceutical compositions (e.g., vaccine compositions) for therapeutic treatment are intended for parenteral, topical, nasal, oral or local administration. A pharmaceutical compositions can be administered parenterally, e.g., intravenously, subcutaneously, intradermally, or intramuscularly. The compositions can be administered at the site of surgical exiscion to induce a local immune response to the tumor. Disclosed herein are compositions for parenteral administration which comprise a solution of the antigen and vaccine compositions are dissolved or suspended in an acceptable carrier, e.g., an aqueous carrier. A variety of aqueous carriers can be used, e.g., water, buffered water, 0.9% saline, 0.3% glycine, hyaluronic acid and the like. These compositions can be sterilized by conventional, well known sterilization techniques, or can be sterile filtered. The resulting aqueous solutions can be packaged for use as is, or lyophilized, the lyophilized preparation being combined with a sterile solution prior to administration. The compositions may contain pharmaceutically acceptable auxiliary substances as required to approximate physiological conditions, such as pH adjusting and buffering agents, tonicity adjusting agents, wetting agents and the like, for example, sodium acetate, sodium lactate, sodium chloride, potassium chloride, calcium chloride, sorbitan monolaurate, triethanolamine oleate, etc.

[0398] Antigens can also be administered via liposomes, which target them to a particular cells tissue, such as lymphoid tissue. Liposomes are also useful in increasing half-life. Liposomes include emulsions, foams, micelles, insoluble monolayers, liquid crystals, phospholipid dispersions, lamellar layers and the like. In these preparations the antigen to be delivered is incorporated as part of a liposome, alone or in conjunction with a molecule which binds to, e.g., a receptor prevalent among lymphoid cells, such as monoclonal antibodies which bind to the CD45 antigen, or with other therapeutic or immunogenic compositions. Thus, liposomes filled with a desired antigen can be directed to the site of lymphoid cells, where the liposomes then deliver the selected therapeutic/immunogenic compositions. Liposomes can be formed from standard vesicle-forming lipids, which generally include neutral and negatively charged phospholipids and a sterol, such as cholesterol. The selection of lipids is generally guided by consideration of, e.g., liposome size, acid lability and stability of the liposomes in the blood stream. A variety of methods are available for preparing liposomes, as described in, e.g., Szoka et al., Ann. Rev. Biophys. Bioeng. 9; 467 (1980), U.S. Pat. Nos. 4,235,871, 4,501,728, 4,501,728, 4,837,028, and 5,019,369.

[0399] For targeting to the immune cells, a ligand to be incorporated into the liposome can include, e.g., antibodies or fragments thereof specific for cell surface determinants of the desired immune system cells. A liposome suspension can be administered intravenously, locally, topically, etc. in a dose which varies according to, inter alia, the manner of administration, the peptide being delivered, and the stage of the disease being treated.

[0400] For therapeutic or immunization purposes, nucleic acids encoding a peptide and optionally one or more of the peptides described herein can also be administered to the patient. A number of methods are conveniently used to deliver the nucleic acids to the patient. For instance, the nucleic acid can be delivered directly, as “naked DNA”. This approach is described, for instance, in Wolff et al., Science 247: 1465-1468 (1990) as well as U.S. Pat. Nos. 5,580,859 and 5,589,466. The nucleic acids can also be administered using ballistic delivery as described, for instance, in U.S. Pat. No. 5,204,253. Particles comprised solely of DNA can be administered. Alternatively, DNA can be adhered to particles, such as gold particles. Approaches for delivering nucleic acid sequences can include viral vectors, mRNA vectors, and DNA vectors with or without electroporation.

[0401] The nucleic acids can also be delivered complexed to cationic compounds, such as cationic lipids. Lipid-mediated gene delivery methods are described, for instance, in 9618372WOAWO 96/18372; 9324640WOAWO 93/24640; Mannino & Gould-Fogerite, BioTechniques 6(7): 682-691 (1988); U.S. Pat. No. 5,279,833 Rose U.S. Pat. Nos. 5,279,833; 9,106,309WOAWO 91/06309; and Felgner et al., Proc. Natl. Acad. Sci. USA 84: 7413-7414 (1987).

[0402] Antigens can also be included in viral vector-based vaccine platforms, such as vaccinia, fowlpox, self-replicating alphavirus, marabavirus, adenovirus (See, e.g., Tatsis et al., Adenoviruses, Molecular Therapy (2004) 10, 616-629), or lentivirus, including but not limited to second, third or hybrid second/third generation lentivirus and recombinant lentivirus of any generation designed to target specific cell types or receptors (See, e.g., Hu et al., Immunization Delivered by Lentiviral Vectors for Cancer and Infectious Diseases, Immunol Rev. (2011) 239(1): 45-61, Sakuma et al., Lentiviral vectors: basic to translational, Biochem J. (2012) 443(3):603-18, Cooper et al., Rescue of splicing-mediated intron loss maximizes expression in lentiviral vectors containing the human ubiquitin C promoter, Nucl. Acids Res. (2015) 43 (1): 682-690, Zufferey et al., Self-Inactivating Lentivirus Vector for Safe and Efficient In Vivo Gene Delivery, J. Virol. (1998) 72 (12): 9873-9880). Dependent on the packaging capacity of the above mentioned viral vector-based vaccine platforms, this approach can deliver one or more nucleotide sequences that encode one or more antigen peptides. The sequences may be flanked by non-mutated sequences, may be separated by linkers or may be preceded with one or more sequences targeting a subcellular compartment (See, e.g., Gros et al., Prospective identification of neoantigen-specific lymphocytes in the peripheral blood of melanoma patients, Nat Med. (2016) 22 (4):433-8, Stronen et al., Targeting of cancer neoantigens with donor-derived T cell receptor repertoires, Science. (2016) 352 (6291):1337-41, Lu et al., Efficient identification of mutated cancer antigens recognized by T cells associated with durable tumor regressions, Clin Cancer Res. (2014) 20(13):3401-10). Upon introduction into a host, infected cells express the antigens, and thereby elicit a host immune (e.g., CTL) response against the peptide(s). Vaccinia vectors and methods useful in immunization protocols are described in, e.g., U.S. Pat. No. 4,722,848. Another vector is BCG (Bacille Calmette Guerin). BCG vectors are described in Stover et al. (Nature 351:456-460 (1991)). A wide variety of other vaccine vectors useful for therapeutic administration or immunization of antigens, e.g., Salmonella typhi vectors, and the like will be apparent to those skilled in the art from the description herein.

[0403] A means of administering nucleic acids uses minigene constructs encoding one or multiple epitopes. To create a DNA sequence encoding the selected CTL epitopes (minigene) for expression in human cells, the amino acid sequences of the epitopes are reverse translated. A human codon usage table is used to guide the codon choice for each amino acid. These epitope-encoding DNA sequences are directly adjoined, creating a continuous polypeptide sequence. To optimize expression and/or immunogenicity, additional elements can be incorporated into the minigene design. Examples of amino acid sequence that could be reverse translated and included in the minigene sequence include: helper T lymphocyte, epitopes, a leader (signal) sequence, and an endoplasmic reticulum retention signal. In addition, NMC presentation of CTL epitopes can be improved by including synthetic (e.g. poly-alanine) or naturally-occurring flanking sequences adjacent to the CTL epitopes. The minigene sequence is converted to DNA by assembling oligonucleotides that encode the plus and minus strands of the minigene. Overlapping oligonucleotides (30-100 bases long) are synthesized, phosphorylated, purified and annealed under appropriate conditions using well known techniques. The ends of the oligonucleotides are joined using T4 DNA ligase. This synthetic minigene, encoding the CTL epitope polypeptide, can then cloned into a desired expression vector.

[0404] Purified plasmid DNA can be prepared for injection using a variety of formulations. The simplest of these is reconstitution of lyophilized DNA in sterile phosphate-buffer saline (PBS). A variety of methods have been described, and new techniques can become available. As noted above, nucleic acids are conveniently formulated with cationic lipids. In addition, glycolipids, fusogenic liposomes, peptides and compounds referred to collectively as protective, interactive, non-condensing (PINC) could also be complexed to purified plasmid DNA to influence variables such as stability, intramuscular dispersion, or trafficking to specific organs or cell types.

[0405] Also disclosed is a method of manufacturing a tumor vaccine, comprising performing the steps of a method disclosed herein; and producing a tumor vaccine comprising a plurality of antigens or a subset of the plurality of antigens.

[0406] Antigens disclosed herein can be manufactured using methods known in the art. For example, a method of producing a antigen or a vector (e.g., a vector including at least one sequence encoding one or more antigens) disclosed herein can include culturing a host cell under conditions suitable for expressing the antigen or vector wherein the host cell comprises at least one polynucleotide encoding the antigen or vector, and purifying the antigen or vector. Standard purification methods include chromatographic techniques, electrophoretic, immunological, precipitation, dialysis, filtration, concentration, and chromatofocusing techniques.

[0407] Host cells can include a Chinese Hamster Ovary (CHO) cell, NSO cell, yeast, or a HEK293 cell. Host cells can be transformed with one or more polynucleotides comprising at least one nucleic acid sequence that encodes a antigen or vector disclosed herein, optionally wherein the isolated polynucleotide further comprises a promoter sequence operably linked to the at least one nucleic acid sequence that encodes the antigen or vector. In certain embodiments the isolated polynucleotide can be cDNA.

### VII. Antigen Use and Administration

[0408] A vaccination protocol can be used to dose a subject with one or more antigens. A priming vaccine and a boosting vaccine can be used to dose the subject. The priming vaccine can be based on C68 (e.g., the sequences shown in SEQ ID NO:1 or 2) or srRNA (e.g., the sequences shown in SEQ ID NO:3 or 4) and the boosting vaccine can be based on C68 (e.g., the sequences shown in SEQ ID NO:1 or 2) or srRNA (e.g., the sequences shown in SEQ ID NO:3 or 4). Each vector typically includes a cassette that includes antigens. Cassettes can include about 20 antigens, separated by spacers such as the natural sequence that normally surrounds each antigen or other non-natural spacer sequences such as AAY. Cassettes can also include MHCII antigens such a tetanus toxoid antigen and PADRE antigen, which can be considered universal class II antigens. Cassettes can also include a targeting sequence such as a ubiquitin targeting sequence. In addition, each vaccine dose can be administered to the subject in conjunction with (e.g., concurrently, before, or after) a checkpoint inhibitor (CPI). CPI's can include those that inhibit CTLA4, PD1, and/or PDL1 such as antibodies or antigen-binding portions thereof. Such antibodies can include tremelimumab or durvalumab.

[0409] A priming vaccine can be injected (e.g., intramuscularly) in a subject. Bilateral injections per dose can be used. For example, one or more injections of ChAdV68 (C68) can be used (e.g., total dose 1×10¹² viral particles); one or more injections of self-replicating RNA (srRNA) at low vaccine dose selected from the range 0.001 to 1 ug RNA, in particular 0.1 or 1 ug can be used; or one or more injections of srRNA at high vaccine dose selected from the range 1 to 100 ug RNA, in particular 10 or 100 ug can be used.

[0410] A vaccine boost (boosting vaccine) can be injected (e.g., intramuscularly) after prime vaccination. A boosting vaccine can be administered about every 1, 2, 3, 4, 5, 6, 7, 8, 9, or 10 weeks, e.g., every 4 weeks and/or 8 weeks after the prime. Bilateral injections per dose can be used. For example, one or more injections of ChAdV68 (C68) can be used (e.g., total dose 1×10¹² viral particles); one or more injections of self-replicating RNA (srRNA) at low vaccine dose selected from the range 0.001 to 1 ug RNA, in particular 0.1 or 1 ug can be used; or one or more injections of srRNA at high vaccine dose selected from the range 1 to 100 ug RNA, in particular 10 or 100 ug can be used.

[0411] Anti-CTLA-4 (e.g., tremelimumab) can also be administered to the subject. For example, anti-CTLA4 can be administered subcutaneously near the site of the intramuscular vaccine injection (ChAdV68 prime or srRNA low doses) to ensure drainage into the same lymph node. Tremelimumab is a selective human IgG2 mAb inhibitor of CTLA-4. Target Anti-CTLA-4 (tremelimumab) subcutaneous dose is typically 70-75 mg (in particular 75 mg) with a dose range of, e.g., 1-100 mg or 5-420 mg.

[0412] In certain instances an anti-PD-L1 antibody can be used such as durvalumab (MEDI 4736). Durvalumab is a selective, high affinity human IgG1 mAb that blocks PD-L1 binding to PD-1 and CD80. Durvalumab is generally administered at 20 mg/kg i.v. every 4 weeks.

[0413] Immune monitoring can be performed before, during, and/or after vaccine administration. Such monitoring can inform safety and efficacy, among other parameters.

[0414] To perform immune monitoring, PBMCs are commonly used. PBMCs can be isolated before prime vaccination, and after prime vaccination (e.g. 4 weeks and 8 weeks). PBMCs can be harvested just prior to boost vaccinations and after each boost vaccination (e.g. 4 weeks and 8 weeks).

[0415] T cell responses can be assessed as part of an immune monitoring protocol. T cell responses can be measured using one or more methods known in the art such as ELISpot, intracellular cytokine staining, cytokine secretion and cell surface capture, T cell proliferation, MHC multimer staining, or by cytotoxicity assay. T cell responses to epitopes encoded in vaccines can be monitored from PBMCs by measuring induction of cytokines, such as IFN-gamma, using an ELISpot assay. Specific CD4 or CD8 T cell responses to epitopes encoded in vaccines can be monitored from PBMCs by measuring induction of cytokines captured intracellularly or extracellularly, such as IFN-gamma, using flow cytometry. Specific CD4 or CD8 T cell responses to epitopes encoded in the vaccines can be monitored from PBMCs by measuring T cell populations expressing T cell receptors specific for epitope/MHC class I complexes using MHC multimer staining. Specific CD4 or CD8 T cell responses to epitopes encoded in the vaccines can be monitored from PBMCs by measuring the ex vivo expansion of T cell populations following 3H-thymidine, bromodeoxyuridine and carboxyfluoresceine-diacetate-succinimidylester (CFSE) incorporation. The antigen recognition capacity and lytic activity of PBMC-derived T cells that are specific for epitopes encoded in vaccines can be assessed functionally by chromium release assay or alternative colorimetric cytotoxicity assays.

### VIII. Antigen Identification

[0416] VIII.A. Antigen Candidate Identification

[0417] Research methods for NGS analysis of tumor and normal exome and transcriptomes have been described and applied in the antigen identification space. ^{6,14,15} Certain optimizations for greater sensitivity and specificity for antigen identification in the clinical setting can be considered. These optimizations can be grouped into two areas, those related to laboratory processes and those related to the NGS data analysis. Examples of optimizations are known to those skilled in the art, for example the methods described in more detail in international patent application publications WO/2017/106638, WO/2018/195357, and WO/2018/208856, each herein incorporated by reference, in their entirety, for all purposes.

[0418] VIII.B. Isolation and Detection of HLA Peptides

[0419] Isolation of HLA-peptide molecules was performed using classic immunoprecipitation (IP) methods after lysis and solubilization of the tissue sample (55-58). A clarified lysate was used for HLA specific IP.

[0420] Immunoprecipitation was performed using antibodies coupled to beads where the antibody is specific for HLA molecules. For a pan-Class I HLA immunoprecipitation, a pan-Class I CR antibody is used, for Class II HLA-DR, an HLA-DR antibody is used. Antibody is covalently attached to NHS-sepharose beads during overnight incubation. After covalent attachment, the beads were washed and aliquoted for IP. (59, 60) Immunoprecipitations can also be performed with antibodies that are not covalently attached to beads. Typically this is done using sepharose or magnetic beads coated with Protein A and/or Protein G to hold the antibody to the column. Some antibodies that can be used to selectively enrich MHC/peptide complex are listed below.

| Antibody Name | Specificity |
|---|---|
| W6/32 | Class I HLA-A, B, C |
| L243 | Class II - HLA-DR |
| Tu36 | Class II - HLA-DR |
| LN3 | Class II - HLA-DR |
| Tu39 | Class II - HLA-DR, DP, DQ |

[0421] The clarified tissue lysate is added to the antibody beads for the immunoprecipitation. After immunoprecipitation, the beads are removed from the lysate and the lysate stored for additional experiments, including additional IPs. The IP beads are washed to remove non-specific binding and the HLA/peptide complex is eluted from the beads using standard techniques. The protein components are removed from the peptides using a molecular weight spin column or C18 fractionation. The resultant peptides are taken to dryness by SpeedVac evaporation and in some instances are stored at −20 C prior to MS analysis.

[0422] Dried peptides are reconstituted in an HPLC buffer suitable for reverse phase chromatography and loaded onto a C-18 microcapillary HPLC column for gradient elution in a Fusion Lumos mass spectrometer (Thermo). MS1 spectra of peptide mass/charge (m/z) were collected in the Orbitrap detector at high resolution followed by MS2 low resolution scans collected in the ion trap detector after HCD fragmentation of the selected ion. Additionally, MS2 spectra can be obtained using either CID or ETD fragmentation methods or any combination of the three techniques to attain greater amino acid coverage of the peptide. MS2 spectra can also be measured with high resolution mass accuracy in the Orbitrap detector.

[0423] MS2 spectra from each analysis are searched against a protein database using Comet (61, 62) and the peptide identification are scored using Percolator (63-65). Additional sequencing is performed using PEAKS studio (Bioinformatics Solutions Inc.) and other search engines or sequencing methods can be used including spectral matching and de novo sequencing (97).

[0424] VIII.B.1. MS Limit of Detection Studies in Support of Comprehensive HLA Peptide Sequencing.

[0425] Using the peptide YVYVADVAAK (SEQ ID NO: 85) it was determined what the limits of detection are using different amounts of peptide loaded onto the LC column. The amounts of peptide tested were 1 pmol, 100fmol, 10 fmol, 1 fmol, and 100amol. (Table 1) The results are shown in FIGS. 24A and 24B. These results indicate that the lowest limit of detection (LoD) is in the attomol range (10⁻¹⁸), that the dynamic range spans five orders of magnitude, and that the signal to noise appears sufficient for sequencing at low femtomol ranges (10⁻¹⁵). Mass spectrometry can be used in conjunction with prediction algorithms described herein to validate HLA presentation. For example, mass spectrometry can be used to validate epitope candidates generated by EDGE prediction model (a deep learning model trained on HLA presented peptides sequenced by MS/MS, as described in international patent application publicationsWO/2017/106638, WO/2018/195357, and WO/2018/208856). An example of the correlation between EDGE score and the probability of detection of candidate shared neoantigen peptides by targeted MS is shown in FIG. 25.

TABLE 1

| | | |
|---|---|---|
| Peptide m/z | Loaded on Column | Copies/Cell in 1e9cells |

| | | | |
|---|---|---|---|
| 566.830 | 1 | pmol | 600 |
| 562.823 | 100 | fmol | 60 |
| 559.816 | 10 | fmol | 6 |
| 556.810 | 1 | fmol | 0.6 |
| 553.802 | 100 | amol | 0.06 |

### IX. Presentation Model

[0426] Presentation models can be used to identify likelihoods of peptide presentation in patients. Various presentation models are known to those skilled in the art, for example the presentation models described in more detail in international patent application publications WO/2017/106638, WO/2018/195357, WO/2018/208856, WO2016187508, and US patent application US20110293637, each herein incorporated by reference, in their entirety, for all purposes.

### X. Training Module

[0427] Training modules can be used to construct one or more presentation models based on training data sets that generate likelihoods of whether peptide sequences will be presented by MHC alleles associated with the peptide sequences. Various training modules are known to those skilled in the art, for example the presentation models described in more detail in international patent application publications WO/2017/106638, WO/2018/195357, and WO/2018/208856, each herein incorporated by reference, in their entirety, for all purposes. A training module can construct a presentation model to predict presentation likelihoods of peptides on a per-allele basis. A training module can also construct a presentation model to predict presentation likelihoods of peptides in a multiple-allele setting where two or more MHC alleles are present.

### XI. Prediction Module

[0428] A prediction module can be used to receive sequence data and select candidate antigens in the sequence data using a presentation model. Specifically, the sequence data may be DNA sequences, RNA sequences, and/or protein sequences extracted from tumor tissue cells of patients. A prediction module may identify candidate neoantigens that are mutated peptide sequences by comparing sequence data extracted from normal tissue cells of a patient with the sequence data extracted from tumor tissue cells of the patient to identify portions containing one or more mutations. A prediction module may identify candidate antigens that have altered expression in a tumor cell or cancerous tissue in comparison to a normal cell or tissue by comparing sequence data extracted from normal tissue cells of a patient with the sequence data extracted from tumor tissue cells of the patient to identify improperly expressed candidate antigens.

[0429] A presentation module can apply one or more presentation model to processed peptide sequences to estimate presentation likelihoods of the peptide sequences. Specifically, the prediction module may select one or more candidate antigen peptide sequences that are likely to be presented on tumor HLA molecules by applying presentation models to the candidate antigens. In one implementation, the presentation module selects candidate antigen sequences that have estimated presentation likelihoods above a predetermined threshold. In another implementation, the presentation model selects the N candidate antigen sequences that have the highest estimated presentation likelihoods (where Nis generally the maximum number of epitopes that can be delivered in a vaccine). A vaccine including the selected candidate antigens for a given patient can be injected into the patient to induce immune responses.

[0430] XI.B.Cassette Design Module

[0431] XI.B.1 Overview

[0432] A cassette design module can be used to generate a vaccine cassette sequence based on selected candidate peptides for injection into a patient. Various cassette design modules are known to those skilled in the art, for example the cassette design modules described in more detail in international patent application publications WO/2017/106638, WO/2018/195357, and WO/2018/208856, each herein incorporated by reference, in their entirety, for all purposes.

[0433] A set of therapeutic epitopes may be generated based on the selected peptides determined by a prediction module associated with presentation likelihoods above a predetermined threshold, where the presentation likelihoods are determined by the presentation models. However it is appreciated that in other embodiments, the set of therapeutic epitopes may be generated based on any one or more of a number of methods (alone or in combination), for example, based on binding affinity or predicted binding affinity to HLA class I or class II alleles of the patient, binding stability or predicted binding stability to HLA class I or class II alleles of the patient, random sampling, and the like.

[0434] Therapeutic epitopes may correspond to selected peptides themselves Therapeutic epitopes may also include C- and/or N-terminal flanking sequences in addition to the selected peptides. N- and C-terminal flanking sequences can be the native N- and C-terminal flanking sequences of the therapeutic vaccine epitope in the context of its source protein. Therapeutic epitopes can represent a fixed-length epitope Therapeutic epitopes can represent a variable-length epitope, in which the length of the epitope can be varied depending on, for example, the length of the C- or N-flanking sequence. For example, the C-terminal flanking sequence and the N-terminal flanking sequence can each have varying lengths of 2-5 residues, resulting in 16 possible choices for the epitope.

[0435] A cassette design module can also generate cassette sequences by taking into account presentation of junction epitopes that span the junction between a pair of therapeutic epitopes in the cassette. Junction epitopes are novel non-self but irrelevant epitope sequences that arise in the cassette due to the process of concatenating therapeutic epitopes and linker sequences in the cassette. The novel sequences of junction epitopes are different from the therapeutic epitopes of the cassette themselves.

[0436] A cassette design module can generate a cassette sequence that reduces the likelihood that junction epitopes are presented in the patient. Specifically, when the cassette is injected into the patient, junction epitopes have the potential to be presented by HLA class I or HLA class II alleles of the patient, and stimulate a CD8 or CD4 T-cell response, respectively. Such reactions are often times undesirable because T-cells reactive to the junction epitopes have no therapeutic benefit, and may diminish the immune response to the selected therapeutic epitopes in the cassette by antigenic competition.⁷⁶

[0437] A cassette design module can iterate through one or more candidate cassettes, and determine a cassette sequence for which a presentation score of junction epitopes associated with that cassette sequence is below a numerical threshold. The junction epitope presentation score is a quantity associated with presentation likelihoods of the junction epitopes in the cassette, and a higher value of the junction epitope presentation score indicates a higher likelihood that junction epitopes of the cassette will be presented by HLA class I or HLA class II or both.

[0438] In one embodiment, a cassette design module may determine a cassette sequence associated with the lowest junction epitope presentation score among the candidate cassette sequences.

[0439] A cassette design module may iterate through one or more candidate cassette sequences, determine the junction epitope presentation score for the candidate cassettes, and identify an optimal cassette sequence associated with a junction epitope presentation score below the threshold.

[0440] A cassette design module may further check the one or more candidate cassette sequences to identify if any of the junction epitopes in the candidate cassette sequences are self-epitopes for a given patient for whom the vaccine is being designed. To accomplish this, the cassette design module checks the junction epitopes against a known database such as BLAST. In one embodiment, the cassette design module may be configured to design cassettes that avoid junction self-epitopes.

[0441] A cassette design module can perform a brute force approach and iterate through all or most possible candidate cassette sequences to select the sequence with the smallest junction epitope presentation score. However, the number of such candidate cassettes can be prohibitively large as the capacity of the vaccine increases. For example, for a vaccine capacity of 20 epitopes, the cassette design module has to iterate through 10¹⁸ possible candidate cassettes to determine the cassette with the lowest junction epitope presentation score. This determination may be computationally burdensome (in terms of computational processing resources required), and sometimes intractable, for the cassette design module to complete within a reasonable amount of time to generate the vaccine for the patient. Moreover, accounting for the possible junction epitopes for each candidate cassette can be even more burdensome. Thus, a cassette design module may select a cassette sequence based on ways of iterating through a number of candidate cassette sequences that are significantly smaller than the number of candidate cassette sequences for the brute force approach.

[0442] A cassette design module can generate a subset of randomly or at least pseudo-randomly generated candidate cassettes, and selects the candidate cassette associated with a junction epitope presentation score below a predetermined threshold as the cassette sequence. Additionally, the cassette design module may select the candidate cassette from the subset with the lowest junction epitope presentation score as the cassette sequence. For example, the cassette design module may generate a subset of ˜1 million candidate cassettes for a set of 20 selected epitopes, and select the candidate cassette with the smallest junction epitope presentation score. Although generating a subset of random cassette sequences and selecting a cassette sequence with a low junction epitope presentation score out of the subset may be sub-optimal relative to the brute force approach, it requires significantly less computational resources thereby making its implementation technically feasible. Further, performing the brute force method as opposed to this more efficient technique may only result in a minor or even negligible improvement in junction epitope presentation score, thus making it not worthwhile from a resource allocation perspective. A cassette design module can determine an improved cassette configuration by formulating the epitope sequence for the cassette as an asymmetric traveling salesman problem (TSP). Given a list of nodes and distances between each pair of nodes, the TSP determines a sequence of nodes associated with the shortest total distance to visit each node exactly once and return to the original node. For example, given cities A, B, and C with known distances between each other, the solution of the TSP generates a closed sequence of cities, for which the total distance traveled to visit each city exactly once is the smallest among possible routes. The asymmetric version of the TSP determines the optimal sequence of nodes when the distance between a pair of nodes are asymmetric. For example, the “distance” for traveling from node A to node B may be different from the “distance” for traveling from node B to node A. By solving for an improved optimal cassette using an asymmetric TSP, the cassette design module can find a cassette sequence that results in a reduced presentation score across the junctions between epitopes of the cassette. The solution of the asymmetric TSP indicates a sequence of therapeutic epitopes that correspond to the order in which the epitopes should be concatenated in a cassette to minimize the junction epitope presentation score across the junctions of the cassette. A cassette sequence determined through this approach can result in a sequence with significantly less presentation of junction epitopes while potentially requiring significantly less computational resources than the random sampling approach, especially when the number of generated candidate cassette sequences is large. Illustrative examples of different computational approaches and comparisons for optimizing cassette design are described in more detail in international patent application publications WO/2017/106638, WO/2018/195357, and WO/2018/208856, each herein incorporated by reference, in their entirety, for all purposes.

### XIII. Example Computer

[0443] A computer can be used for any of the computational methods described herein. One skilled in the art will recognize a computer can have different architectures. Examples of computers are known to those skilled in the art, for example the computers described in more detail in international patent application publications WO/2017/106638, WO/2018/195357, and WO/2018/208856, each herein incorporated by reference, in their entirety, for all purposes.

### XIV. Antigen Delivery Vector Example

[0444] Below are examples of specific embodiments for carrying out the present invention. The examples are offered for illustrative purposes only, and are not intended to limit the scope of the present invention in any way. Efforts have been made to ensure accuracy with respect to numbers used (e.g., amounts, temperatures, etc.), but some experimental error and deviation should, of course, be allowed for.

[0445] The practice of the present invention will employ, unless otherwise indicated, conventional methods of protein chemistry, biochemistry, recombinant DNA techniques and pharmacology, within the skill of the art. Such techniques are explained fully in the literature. See, e.g., T. E. Creighton, Proteins: Structures and Molecular Properties (W.H. Freeman and Company, 1993); A. L. Lehninger, Biochemistry (Worth Publishers, Inc., current addition); Sambrook, et al., Molecular Cloning: A Laboratory Manual (2nd Edition, 1989); Methods In Enzymology (S. Colowick and N. Kaplan eds., Academic Press, Inc.); Remington's Pharmaceutical Sciences, 18th Edition (Easton, Pa.: Mack Publishing Company, 1990); Carey and Sundberg Advanced Organic Chemistry 3^{rd} Ed. (Plenum Press) Vols A and B (1992).

[0446] XIV.A. Neoantigen Cassette Design

[0447] Through vaccination, multiple class I MHC restricted tumor-specific neoantigens (TSNAs) that stimulate the corresponding cellular immune response(s) can be delivered. In one example, a vaccine cassette was engineered to encode multiple epitopes as a single gene product where the epitopes were either embedded within their natural, surrounding peptide sequence or spaced by non-natural linker sequences. Several design parameters were identified that could potentially impact antigen processing and presentation and therefore the magnitude and breadth of the TSNA specific CD8 T cell responses. In the present example, several model cassettes were designed and constructed to evaluate: (1) whether robust T cell responses could be generated to multiple epitopes incorporated in a single expression cassette; (2) what makes an optimal linker placed between the TSNAs within the expression cassette—that leads to optimal processing and presentation of all epitopes; (3) if the relative position of the epitopes within the cassette impact T cell responses; (4) whether the number of epitopes within a cassette influences the magnitude or quality of the T cell responses to individual epitopes; (5) if the addition of cellular targeting sequences improves T cell responses.

[0448] Two readouts were developed to evaluate antigen presentation and T cell responses specific for marker epitopes within the model cassettes: (1) an in vitro cell-based screen which allowed assessment of antigen presentation as gauged by the activation of specially engineered reporter T cells (Aarnoudse et al., 2002; Nagai et al., 2012); and (2) an in vivo assay that used HLA-A2 transgenic mice (Vitiello et al., 1991) to assess post-vaccination immunogenicity of cassette-derived epitopes of human origin by their corresponding epitope-specific T cell responses (Cornet et al., 2006; Depla et al., 2008; Ishioka et al., 1999).

[0449] XIV.B. Antigen Cassette Design Evaluation

[0450] XIV.B.1. Methods and Materials

### TCR and Cassette Design and Cloning

[0451] The selected TCRs recognize peptides NLVPMVATV (SEQ ID NO: 86) (PDB #5D2N), CLGGLLTMV (SEQ ID NO: 87) (PDB #3REV), GILGFVFTL (SEQ ID NO: 88) (PDB #1OGA) LLFGYPVYV (SEQ ID NO: 89) (PDB #1A07) when presented by A*0201. Transfer vectors were constructed that contain 2A peptide-linked TCR subunits (beta followed by alpha), the EMCV IRES, and 2A-linked CD8 subunits (beta followed by alpha and by the puromycin resistance gene). Open reading frame sequences were codon-optimized and synthesized by GeneArt.

### Cell Line Generation for In Vitro Epitope Processing and Presentation Studies

[0452] Peptides were purchased from ProImmune or Genscript diluted to 10 mg/mL with 10 mM tris(2-carboxyethyl)phosphine (TCEP) in water/DMSO (2:8, v/v). Cell culture medium and supplements, unless otherwise noted, were from Gibco. Heat inactivated fetal bovine serum (FBShi) was from Seradigm. QUANTI-Luc Substrate, Zeocin, and Puromycin were from InvivoGen. Jurkat-Lucia NFAT Cells (InvivoGen) were maintained in RPMI 1640 supplemented with 10% FBShi, Sodium Pyruvate, and 100 μg/mL Zeocin. Once transduced, these cells additionally received 0.3 pg/mL Puromycin. T2 cells (ATCC CRL-1992) were cultured in Iscove's Medium (IMDM) plus 20% FBShi. U-87 MG (ATCC HTB-14) cells were maintained in MEM Eagles Medium supplemented with 10% FBShi.

[0453] Jurkat-Lucia NFAT cells contain an NFAT-inducible Lucia reporter construct. The Lucia gene, when activated by the engagement of the T cell receptor (TCR), causes secretion of a coelenterazine-utilizing luciferase into the culture medium. This luciferase can be measured using the QUANTI-Luc luciferase detection reagent. Jurkat-Lucia cells were transduced with lentivirus to express antigen-specific TCRs. The HIV-derived lentivirus transfer vector was obtained from GeneCopoeia, and lentivirus support plasmids expressing VSV-G (pCMV-VsvG), Rev (pRSV-Rev) and Gag-pol (pCgpV) were obtained from Cell Design Labs.

[0454] Lentivirus was prepared by transfection of 50-80% confluent T75 flasks of HEK293 cells with Lipofectamine 2000 (Thermo Fisher), using 40 μl of lipofectamine and 20 pg of the DNA mixture (4:2:1:1 by weight of the transfer plasmid:pCgpV:pRSV-Rev:pCMV-VsvG). 8-10 mL of the virus-containing media were concentrated using the Lenti-X system (Clontech), and the virus resuspended in 100-200 μl of fresh medium. This volume was used to overlay an equal volume of Jurkat-Lucia cells (5×10E4-1×10E6 cells were used in different experiments). Following culture in 0.3 pg/ml puromycin-containing medium, cells were sorted to obtain clonality. These Jurkat-Lucia TCR clones were tested for activity and selectivity using peptide loaded T2 cells.

### In Vitro Epitope Processing and Presentation Assay

[0455] T2 cells are routinely used to examine antigen recognition by TCRs. T2 cells lack a peptide transporter for antigen processing (TAP deficient) and cannot load endogenous peptides in the endoplasmic reticulum for presentation on the MHC. However, the T2 cells can easily be loaded with exogenous peptides. The five marker peptides (NLVPMVATV (SEQ ID NO: 86), CLGGLLTMV (SEQ ID NO: 87), GLCTLVAML (SEQ ID NO: 90), LLFGYPVYV (SEQ ID NO: 89), GILGFVFTL (SEQ ID NO: 88)) and two irrelevant peptides (WLSLLVPFV (SEQ ID NO: 91), FLLTRICT (SEQ ID NO: 92)) were loaded onto T2 cells. Briefly, T2 cells were counted and diluted to 1×106 cells/mL with IMDM plus 1% FBShi. Peptides were added to result in 10 pg peptide/1×106 cells. Cells were then incubated at 37° C. for 90 minutes. Cells were washed twice with IMDM plus 20% FBShi, diluted to 5×10E5 cells/mL and 100 μL plated into a 96-well Costar tissue culture plate. Jurkat-Lucia TCR clones were counted and diluted to 5×10E5 cells/mL in RPMI 1640 plus 10% FBShi and 100 μL added to the T2 cells. Plates were incubated overnight at 37° C., 5% CO₂. Plates were then centrifuged at 400 g for 3 minutes and 20 μL supernatant removed to a white flat bottom Greiner plate. QUANTI-Luc substrate was prepared according to instructions and 50 μL/well added. Luciferase expression was read on a Molecular Devices SpectraMax iE3x.

[0456] To test marker epitope presentation by the adenoviral cassettes, U-87 MG cells were used as surrogate antigen presenting cells (APCs) and were transduced with the adenoviral vectors. U-87 MG cells were harvested and plated in culture media as 5×10E5 cells/100 μl in a 96-well Costar tissue culture plate. Plates were incubated for approximately 2 hours at 37° C. Adenoviral cassettes were diluted with MEM plus 10% FBShi to an MOI of 100, 50, 10, 5, 1 and 0 and added to the U-87 MG cells as 5 p/well. Plates were again incubated for approximately 2 hours at 37° C. Jurkat-Lucia TCR clones were counted and diluted to 5×10E5 cells/mL in RPMI plus 10% FBShi and added to the U-87 MG cells as 100 μL/well. Plates were then incubated for approximately 24 hours at 37° C., 5% CO₂. Plates were centrifuged at 400 g for 3 minutes and 20 μL supernatant removed to a white flat bottom Greiner plate. QUANTI-Luc substrate was prepared according to instructions and 50 μL/well added. Luciferase expression was read on a Molecular Devices SpectraMax iE3×.

### Mouse Strains for Immunogenicity Studies

[0457] Transgenic HLA-A2.1 (HLA-A2 Tg) mice were obtained from Taconic Labs, Inc. These mice carry a transgene consisting of a chimeric class I molecule comprised of the human HLA-A2.1 leader, α1, and α2 domains and the murine H2-Kb α3, transmembrane, and cytoplasmic domains (Vitiello et al., 1991). Mice used for these studies were the first generation offspring (F1) of wild type BALB/cAnNTac females and homozygous HLA-A2.1 Tg males on the C57Bl/6 background.

### Adenovirus Vector (Ad5v) Immunizations

[0458] HLA-A2 Tg mice were immunized with 1×10¹⁰ to 1×10⁶ viral particles of adenoviral vectors via bilateral intramuscular injection into the tibialis anterior. Immune responses were measured at 12 days post-immunization.

### Lymphocyte Isolation

[0459] Lymphocytes were isolated from freshly harvested spleens and lymph nodes of immunized mice. Tissues were dissociated in RPMI containing 10% fetal bovine serum with penicillin and streptomycin (complete RPMI) using the GentleMACS tissue dissociator according to the manufacturer's instructions.

### Ex Vivo Enzyme-Linked Immunospot (ELISPOT) Analysis

[0460] ELISPOT analysis was performed according to ELISPOT harmonization guidelines (Janetzki et al., 2015) with the mouse IFNg ELISpotPLUS kit (MABTECH). 1×10⁵ splenocytes were incubated with 10 uM of the indicated peptides for 16 hours in 96-well IFNg antibody coated plates. Spots were developed using alkaline phosphatase. The reaction was timed for 10 minutes and was quenched by running the plate under tap water. Spots were counted using an AID vSpot Reader Spectrum. For ELISPOT analysis, wells with saturation >50% were recorded as “too numerous to count”. Samples with deviation of replicate wells >10% were excluded from analysis. Spot counts were then corrected for well confluency using the formula: spot count+2×(spot count×% confluence/[100%−% confluence]). Negative background was corrected by subtraction of spot counts in the negative peptide stimulation wells from the antigen stimulated wells. Finally, wells labeled too numerous to count were set to the highest observed corrected value, rounded up to the nearest hundred.

### Ex Vivo Intracellular Cytokine Staining (ICS) and Flow Cytometry Analysis

[0461] Freshly isolated lymphocytes at a density of 2-5×10⁶ cells/mL were incubated with 10 uM of the indicated peptides for 2 hours. After two hours, brefeldin A was added to a concentration of 5 ug/ml and cells were incubated with stimulant for an additional 4 hours. Following stimulation, viable cells were labeled with fixable viability dye eFluor780 according to manufacturer's protocol and stained with anti-CD8 APC (clone 53-6.7, BioLegend) at 1:400 dilution. Anti-IFNg PE (clone XMG1.2, BioLegend) was used at 1:100 for intracellular staining. Samples were collected on an Attune NxT Flow Cytometer (Thermo Scientific). Flow cytometry data was plotted and analyzed using FlowJo. To assess degree of antigen-specific response, both the percent IFNg+ of CD8+ cells and the total IFNg+ cell number/1×10⁶ live cells were calculated in response to each peptide stimulant.

[0462] XIV.B.2. In Vitro Evaluation of Antigen Cassette Designs

[0463] As an example of antigen cassette design evaluation, an in vitro cell-based assay was developed to assess whether selected human epitopes within model vaccine cassettes were being expressed, processed, and presented by antigen-presenting cells (FIG. 1). Upon recognition, Jurkat-Lucia reporter T cells that were engineered to express one of five TCRs specific for well-characterized peptide-HLA combinations become activated and translocate the nuclear factor of activated T cells (NFAT) into the nucleus which leads to transcriptional activation of a luciferase reporter gene. Antigenic stimulation of the individual reporter CD8 T cell lines was quantified by bioluminescence.

[0464] Individual Jurkat-Lucia reporter lines were modified by lentiviral transduction with an expression construct that includes an antigen-specific TCR beta and TCR alpha chain separated by a P2A ribosomal skip sequence to ensure equimolar amounts of translated product (Banu et al., 2014). The addition of a second CD8 beta-P2A-CD8 alpha element to the lentiviral construct provided expression of the CD8 co-receptor, which the parent reporter cell line lacks, as CD8 on the cell surface is crucial for the binding affinity to target pMHC molecules and enhances signaling through engagement of its cytoplasmic tail (Lyons et al., 2006; Yachi et al., 2006).

[0465] After lentiviral transduction, the Jurkat-Lucia reporters were expanded under puromycin selection, subjected to single cell fluorescence assisted cell sorting (FACS), and the monoclonal populations tested for luciferase expression. This yielded stably transduced reporter cell lines for specific peptide antigens 1, 2, 4, and 5 with functional cell responses. (Table 2).

TABLE 2
Development of an in vitro T cell activation assay.
Peptide-specific T cell recognition as measured by
induction of luciferase indicates effective processing
and presentation of the vaccine cassette antigens.

| | Short Cassette Design |
|---|---|
| Epitope | AAY |
| 1 | 24.5 ± 0.5 |
| 2 | 11.3 ± 0.4 |
| 3* | n/a |
| 4 | 26.1 ± 3.1 |
| 5 | 46.3 ± 1.9 |

*Reporter T cell for epitope 3 not yet generated

[0466] In another example, a series of short cassettes, all marker epitopes were incorporated in the same position (FIG. 2A) and only the linkers separating the HLA-A*0201 restricted epitopes (FIG. 2B) were varied. Reporter T cells were individually mixed with U-87 antigen-presenting cells (APCs) that were infected with adenoviral constructs expressing these short cassettes, and luciferase expression was measured relative to uninfected controls. All four antigens in the model cassettes were recognized by matching reporter T cells, demonstrating efficient processing and presentation of multiple antigens. The magnitude of T cell responses follow largely similar trends for the natural and AAY-linkers. The antigens released from the RR-linker based cassette show lower luciferase inductions (Table 3). The DPP-linker, designed to disrupt antigen processing, produced a vaccine cassette that led to low epitope presentation (Table 3).

TABLE 3
Evaluation of linker sequences in short cassettes. Luciferase induction in
the in vitro T cell activation assay indicated that, apart from the DPP-based
cassette, all linkers facilitated efficient release of the cassette antigens.
T cell epitope only (no linker) = 9AA, natural linker one side =
17AA, natural linker both sides = 25AA, non-natural linkers = AAY, RR, DPP

| | Short Cassette Designs | | | | | |
|---|---|---|---|---|---|---|
| Epitope | 9AA | 17AA | 25AA | AAY | RR | DPP |
| 1 | 33.6 ± 0.9 | 42.8 ± 2.1 | 42.3 ± 2.3 | 24.5 ± 0.5 | 21.7 ± 0.9 | 0.9 ± 0.1 |
| 2 | 12.0 ± 0.9 | 10.3 ± 0.6 | 14.6 ± 04 | 11.3 ± 0.4 | 8.5 ± 0.3 | 1.1 ± 0.2 |
| 3* | n/a | n/a | n/a | n/a | n/a | n/a |
| 4 | 26.6 ± 2.5 | 16.1 ± 0.6 | 16.6 ± 0.8 | 26.1 ± 3.1 | 12.5 ± 0.8 | 1.3 ± 0.2 |
| 5 | 29.7 ± 0.6 | 21.2 ± 0.7 | 24.3 ± 1.4 | 46.3 ± 1.9 | 19.7 ± 0.4 | 1.3 ± 0.1 |

*Reporter T cell for epitope 3 not yet generated

[0467] In another example, an additional series of short cassettes were constructed that, besides human and mouse epitopes, contained targeting sequences such as ubiquitin (Ub), MHC and Ig-kappa signal peptides (SP), and/or MHC transmembrane (TM) motifs positioned on either the N- or C-terminus of the cassette. (FIG. 3). When delivered to U-87 APCs by adenoviral vector, the reporter T cells again demonstrated efficient processing and presentation of multiple cassette-derived antigens. However, the magnitude of T cell responses were not substantially impacted by the various targeting features (Table 4).

TABLE 4
Evaluation of cellular targeting sequences added to model vaccine cassettes. Employing the in vitro T cell activation
assay demonstrated that the four HLA-A*0201 restricted marker epitopes are liberated efficiently from the model
cassettes and targeting sequences did not substantially improve T cell recognition and activation.

| | Short Cassette Designs | | | | | | | | | |
|---|---|---|---|---|---|---|---|---|---|---|
| Epitope | A | B | C | D | E | F | G | H | I | J |
| 1 | 32.5 ± 1.5 | 31.8 ± 0.8 | 29.1 ± 1.2 | 29.1 ± 1.1 | 28.4 ± 0.7 | 20.4 ± 0.5 | 35.0 ± 1.3 | 30.3 ± 2.0 | 22.5 ± 0.9 | 38.1 ± 1.6 |
| 2 | 6.1 ± 0.2 | 6.3 ± 0.2 | 7.6 ± 0.4 | 7.0 ± 0.5 | 5.9 ± 0.2 | 3.7 ± 0.2 | 7.6 ± 0.4 | 5.4 ± 0.3 | 6.2 ± 0.4 | 6.4 ± 0.3 |
| 3* | n/a | n/a | n/a | n/a | n/a | n/a | n/a | n/a | n/a | n/a |
| 4 | 12.3 ± 1.1 | 14.1 ± 0.7 | 12.2 ± 0.8 | 13.7 ± 1.0 | 11.7 ± 0.8 | 10.6 ± 0.4 | 11.0 ± 0.6 | 7.6 ± 0.6 | 16.1 ± 0.5 | 8.7 ± 0.5 |
| 5 | 44.4 ± 2.8 | 53.6 ± 1.6 | 49.9 ± 3.3 | 50.5 ± 2.8 | 41.7 ± 2.8 | 36.1 ± 1.1 | 46.5 ± 2.1 | 31.4 ± 0.6 | 75.4 ± 1.6 | 35.7 ± 2.2 |

*Reporter T cell for epitope 3 not yet generated

[0468] XIV.B.3. In Vivo Evaluation of Antigen Cassette Designs

[0469] As another example of antigen cassette design evaluation, vaccine cassettes were designed to contain 5 well-characterized human class I MHC epitopes known to stimulate CD8 T cells in an HLA-A*02:01 restricted fashion (FIG. 2A, 3, 5A). For the evaluation of their in vivo immunogenicity, vaccine cassettes containing these marker epitopes were incorporated in adenoviral vectors and used to infect HLA-A2 transgenic mice (FIG. 4). This mouse model carries a transgene consisting partly of human HLA-A*0201 and mouse H2-Kb thus encoding a chimeric class I MHC molecule consisting of the human HLA-A2.1 leader, α1 and α2 domains ligated to the murine α3, transmembrane and cytoplasmic H2-Kb domain (Vitiello et al., 1991). The chimeric molecule allows HLA-A*02:01-restricted antigen presentation whilst maintaining the species-matched interaction of the CD8 co-receptor with the α3 domain on the MHC.

[0470] For the short cassettes, all marker epitopes generated a T cell response, as determined by IFN-gamma ELISPOT, that was approximately 10-50× stronger of what has been commonly reported (Cornet et al., 2006; Depla et al., 2008; Ishioka et al., 1999). Of all the linkers evaluated, the concatamer of 25mer sequences, each containing a minimal epitope flanked by their natural amino acids sequences, generated the largest and broadest T cell response (Table 5). Intracellular cytokine staining (ICS) and flow cytometry analysis revealed that the antigen-specific T cell responses are derived from CD8 T cells.

TABLE 5
In vivo evaluation of linker sequences in short cassettes. ELISPOT data indicated that
HLA-A2 transgenic mice, 17 days post-infection with 1e11 adenovirus viral particles,
generated a T cell response to all class I MHC restricted epitopes in the cassette.

| | Short Cassette Designs | | | | | |
|---|---|---|---|---|---|---|
| Epitope | 9AA | 17AA | 25AA | AAY | RR | DPP |
| 1 | 2020 +/− 583 | 2505 +/− 1281 | 6844 +/− 956 | 1489 +/− 762 | 1675 +/− 690 | 1781 +/− 774 |
| 2 | 4472 +/− 755 | 3792 +/− 1319 | 7629 +/− 996 | 3851 +/− 1748 | 4726 +/− 1715 | 5868 +/− 1427 |
| 3 | 5830 +/− 315 | 3629 +/− 862 | 7253 +/− 491 | 4813 +/− 1761 | 6779 +/− 1033 | 7328 +/− 1700 |
| 4 | 5536 +/− 375 | 2446 +/− 955 | 2961 +/− 1487 | 4230 +/− 1759 | 6518 +/− 909 | 7222 +/− 1824 |
| 5 | 8800 +/− 0 | 7943 +/− 821 | 8423 +/− 442 | 8312 +/− 696 | 8800 +/− 0 | 1836 +/− 328 |

[0471] In another example, a series of long vaccine cassettes was constructed and incorporated in adenoviral vectors that, next to the original 5 marker epitopes, contained an additional 16 HLA-A*02:01, A*03:01 and B*44:05 epitopes with known CD8 T cell reactivity (FIG. 5A, B). The size of these long cassettes closely mimicked the final clinical cassette design, and only the position of the epitopes relative to each other was varied. The CD8 T cell responses were comparable in magnitude and breadth for both long and short vaccine cassettes, demonstrating that (a) the addition of more epitopes did not substantially impact the magnitude of immune response to the original set of epitopes, and (b) the position of an epitope in a cassette did not substantially influence the ensuing T cell response to it (Table 6).

TABLE 6
In vivo evaluation of the impact of epitope position in
long cassettes. ELISPOT data indicated that HLA-A2 transgenic
mice, 17 days post-infection with 5e10 adenovirus viral
particles, generated a T cell response comparable in magnitude
for both long and short vaccine cassettes.

| | Long Cassette Designs | | |
|---|---|---|---|
| Epitope | Standard | Scrambled | Short |
| 1 | 863 +/− 1080 | 804 +/− 1113 | 1871 +/− 2859 |
| 2 | 6425 +/− 1594 | 28 +/− 62 | 5390 +/− 1357 |
| 3* | 23 +/− 30 | 36 +/− 18 | 0 +/− 48 |
| 4 | 2224 +/− 1074 | 2727 +/− 644 | 2637 +/− 1673 |
| 5 | 7952 +/− 297 | 8100 +/− 0 | 8100 +/− 0 |

*Suspected technical error caused an absence of a T cell response.

[0472] XIV.B.4. Antigen Cassette Design for Immunogenicity and Toxicology Studies

[0473] In summary, the findings of the model cassette evaluations (FIG. 2-5, Tables 2-6) demonstrated that, for model vaccine cassettes, robustimmunogenicity was achieved when a “string of beads” approach was employed that encodes around 20 epitopes in the context of an adenovirus-based vector. The epitopes were assembled by concatenating 25mer sequences, each embedding a minimal CD8 T cell epitope (e.g. 9 amino acid residues) that were flanked on both sides by its natural, surrounding peptide sequence (e.g. 8 amino acid residues on each side). As used herein, a “natural” or “native” flanking sequence refers to the N- and/or C-terminal flanking sequence of a given epitope in the naturally occurring context of that epitope within its source protein. For example, the HCMV pp65 MHC I epitope NLVPMVATV (SEQ ID NO: 86) is flanked on its 5′ end by the native 5′ sequence WQAGILAR (SEQ ID NO: 93) and on its 3′ end by the native 3′ sequence QGQNLKYQ (SEQ ID NO: 94), thus generating the WQAGILARNLVPMVATVQGQNLKYQ (SEQ ID NO: 95) 25mer peptide found within the HCMV pp65 source protein. The natural or native sequence can also refer to a nucleotide sequence that encodes an epitope flanked by native flanking sequence(s). Each 25mer sequence is directly connected to the following 25mer sequence. In instances where the minimal CD8 T cell epitope is greater than or less than 9 amino acids, the flanking peptide length can be adjusted such that the total length is still a 25mer peptide sequence. For example, a 10 amino acid CD8 T cell epitope can be flanked by an 8 amino acid sequence and a 7 amino acid. The concatamer was followed by two universal class II MHC epitopes that were included to stimulate CD4 T helper cells and improve overall in vivo immunogenicity of the vaccine cassette antigens. (Alexander et al., 1994; Panina-Bordignon et al., 1989) The class II epitopes were linked to the final class I epitope by a GPGPG amino acid linker (SEQ ID NO:56). The two class II epitopes were also linked to each other by a GPGPG amino acid linker (SEQ ID NO: 56), as a well as flanked on the C-terminus by a GPGPG amino acid linker (SEQ ID NO: 56). Neither the position nor the number of epitopes appeared to substantially impact T cell recognition or response. Targeting sequences also did not appear to substantially impact the immunogenicity of cassette-derived antigens.

[0474] As a further example, based on the in vitro and in vivo data obtained with model cassettes (FIG. 2-5, Tables 2-6), a cassette design was generated that alternates well-characterized T cell epitopes known to be immunogenic in nonhuman primates (NHPs), mice and humans. The 20 epitopes, all embedded in their natural 25mer sequences, are followed by the two universal class II MHC epitopes that were present in all model cassettes evaluated (FIG. 6). This cassette design was used to study immunogenicity as well as pharmacology and toxicology studies in multiple species.

[0475] XIV.B.5. Antigen Cassette Design and Evaluation for 30, 40, and 50 Antigens

[0476] Large antigen cassettes were designed that had either 30 (L), 40 (XL) or 50 (XXL) epitopes, each 25 amino acids in length. The epitopes were a mix of human, NHP and mouse epitopes to model disease antigens including tumor antigens. FIG. 29 illustrates the general organization of the epitopes from the various species. The model antigens used are described in Tables 37, 38 and 39 for human, primate, and mouse model epitopes, respectively. Each of Tables 37, 38 and 39 described the epitope position, name, minimal epitope description, and MHC class.

[0477] These cassettes were cloned into the chAd68 and srRNA vaccine vectors as described to evaluate the efficacy of longer multiple-epitope cassettes. FIG. 30 shows that each of the large antigen cassettes were expressed from a ChAdV vector as indicated by at least one major band of the expected size by Western blot.

[0478] Mice were immunized as described to evaluate the efficacy of the large cassettes. T cell responses were analyzed by ICS and tetramer staining following immunization with a chAd68 vector (FIG. 31/Table 40 and FIG. 32/Table 41, respectively) and by ICS following immunization with a srRNA vector (FIG. 33/Table 42) for epitopes AH1 (top panels) and SINNFEKL (SEQ ID NO: 96) (bottom panels). Immunizations using chAd68 and srRNA vaccine vectors expressing either 30 (L), 40 (XL) or 50 (XXL) epitopes induced CD8+ immune responses to model disease epitopes.

TABLE 37
Human epitopes in large cassettes (SEQ ID NOS 88-90, 86-87, 115-127, 95, and 128-
138, respectively, in order of columns)

| Epitope position in each cassette | | | | | | | | | |
|---|---|---|---|---|---|---|---|---|---|
| L | XL | XXL | Name | Minimal epitope | 25 mer | MHC | Restriction | Strain | Species |
| 3 | 3 | 3 | 5.influenza M | GILGFVFTL | PILSPLTKGILGFVFTLTVPSERGL | Class I | A*02:01 | Human | Human |
| 6 | 6 | 6 | 4.HTLV-1 Tax | LLFGYPVYV | HFPGFGQSLLFGYPVYVFGDCVQGD | Class I | A*02:01 | Human | Human |
| 9 | 9 | 9 | 3.EBV BMLF1 | GLCTLVAML | RMQAIQNAGLCTLVAMLEETIFWLQ | Class I | A*02:01 | Human | Human |
| 12 | 12 | 12 | 1.HCMV pp65 | NLVPMVATV | WQAGILARNLVPMVATVQGQNLKYQ | Class I | A*02:01 | Human | Human |
| 15 | 15 | 15 | 2.EBV LMP2A | CLGGLLTMV | RTYGPVFMCLGGLLTMVAGAVWLTV | Class I | A*02:01 | Human | Human |
| 18 | 18 | 18 | CT83 | NTDNNLAVY | SSSGLINSNTDNNLAVYDLSRDILN | Class I | A*01:01 | Human | Human |
| | 21 | 21 | MAGEA6 | EVDPIGHVY | LVFGIELMEVDPIGHVYIFATCLGL | Class I | B*35:01 | Human | Human |
| 21 | 25 | 25 | CT83 | LLASSILCA | MNFYLLLASSILCALIVFWKYRRFQ | Class I | A*02:01 | Human | Human |
| 24 | 31 | 28 | FOXE1 | AIFPGAVPAA | AAAAAAAAIFPGAVPAARPPYPGAV | Class I | A*02:01 | Human | Human |
| 27 | 35 | 32 | CT83 | VYDLSRDIL | SNTDNNLAVYDLSRDILNNFPHSIA | Class I | A*24:02 | Human | Human |
| | 38 | 36 | MAGE3/6 | ASSLPTTMNY | DPPQSPQGASSLPTTMNYPLWSQSY | Class I | A*01:01 | Human | Human |
| 30 | 40 | 40 | Influenza HA | PKYVKQNTLKLAT | ITYGACPKYVKQNTLKLATGMRNVP | Class II | DRB1*0101 | Human | Human |
| | | 44 | CMV pp65 | LPLKMLNIPSINVH | SIYVYALPLKMLNIPSINVHHYPSA | Class II | DRB1*0101 | Human | Human |
| | | 47 | EBV EBNA3A | PEQWMFQGAPPSQGT | EGPWVPEQWMFQGAPPSQGTDVVQH | Class II | DRB1*0102 | Human | Human |
| | | 50 | CMV pp65 | EHPTFTSQYRIQGKL | RGPQYSEHPTFTSQYRIQGKLEYRH | Class II | DRB1*1101 | Human | Human |

TABLE 38
NHP epitopes in large cassettes (SEQ ID NOS 139-168, respectively, in order of
columns)

| Epitope position in each cassette | | | | | | | | | |
|---|---|---|---|---|---|---|---|---|---|
| L | XL | XXL | Name | Minimal epitope | 25 mer | MHC | Restriction | Strain | Species |
| 1 | 1 | 1 | Gag CM9 | CTPYDINQM | MFQALSEGCTPYDINQMLNVLGDHQ | Class I | Mamu-A*01 | Rhesus | NHP |
| 4 | 4 | 4 | Tat TL8 | TTPESANL | SCISEADATTPESANLGEEILSQLY | Class I | Mamu-A*01 | Rhesus | NHP |
| 7 | 7 | 7 | Env CL9 | CAPPGYALL | WDAIRFRYCAPPGYALLRCNDTNYS | Class I | Mamu-A*01 | Rhesus | NHP |
| 10 | 10 | 10 | Pol SV9 | SGPKTNIIV | AFLMALTDSGPKTNIIVDSQYVMGI | Class I | Mamu-A*01 | Rhesus | NHP |
| 13 | 13 | 13 | Gag LW9 | LSPRTLNAW | GNVWVHTPLSPRTLNAWVKAVEEKK | Class I | Mamu-A*01 | Rhesus | NHP |
| | | 16 | Env_TL9 | TVPWPNASL | AFRQVCHTTVPWPNASLTPKWNNET | Class I | Mamu-A*01 | Rhesus | NHP |
| 16 | 16 | 19 | Ag85B | PNGTHSWEYWGAQLN | VFNEPPNGTHSWEYWGAQLNAMKGD | Class II | Mamu-DR*V | Rhesus | NHP |
| 19 | 19 | 23 | HIV-1 Env | YKYKVVKIEPLGV | NWRSELYKYKVVKIEPLGVAPTKAK | Class II | Mamu-DR*V | Rhesus | NHP |
| | | 26 | Gag TE15 | TEEAKQIVQRHLVVE | EKVKHTEEAKQIVQRHLVVETGTTE | Class II | Mamu-DRB* | Rhesus | NHP |
| | 23 | 30 | CFP-1036-48 | AGSLQGQWRGAAG | DQVESTAGSLQGQWRGAAGTAAQAA | Class II | Mafa-DRB1* | Cyno | NHP |
| | 27 | 34 | CFP-1071-86 | EISTNIRQAGVQYSRA | QELDEISTNIRQAGVQYSRADEEQQ | Class II | Mafa-DRB1* | Cyno | NHP |
| 22 | 29 | 38 | Env 338-346 | RPKQAWCWF | FHSQPINERPKQAWCWEGGSWKEA1 | Class I | Mafa-A1*06 | Cyno | NHP |
| 25 | 33 | 42 | Nef 103-111 | RPKVPLRTM | DDIDEEDDDLVGVSVRPKVPLRTMS | Class I | Mafa-A1*06 | Cyno | NHP |
| 28 | 37 | 45 | Gag 386-394 | GPRKPIKCW | PFAAAQQRGPRKPIKCWNCGKEGHS | Class I | Mafa-A1*06 | Cyno | NHP |
| | | 48 | Nef LT9 | LNMADKKET | RRLTARGLLNMADKKETRTPKKAKA | Class I | Mafa-B*104 | Cyno | NHP |

TABLE 39
Mouse epitopes in large cassettes (SEQ ID NOS 83, 169-171, 84, and 172-206,
respectively, in order of columns)

| Epitope position in each cassette | | | | | | | Re- | | |
|---|---|---|---|---|---|---|---|---|---|
| L | XL | XXL | Name | Minimal epitope | 25 mer | MHC | striction | Strain | Species |
| 2 | 2 | 2 | OVA257 | SIINFEKL | VSGLEQLESIINFEKLTEWTSSNVM | Class I | H2-Kb | B6 | Mouse |
| | | 5 | B16-EGP | EGPRNQDWL | ALLAVGALEGPRNQDWLGVPRQLVT | Class I | H2-Db | B6 | Mouse |
| | | 8 | B16-TRP1 455-463 | TAPDNLGYM | VTNTEMFVTAPDNLGYMYEVQWPGQ | Class I | H2-Db | B6 | Mouse |
| | | 11 | Trp2180-188 | SVYDFFVWL | TQPQIANCSVYDFFVWLHYYSVRDT | Class I | H2-Kb | B6 | Mouse |
| 5 | 5 | 14 | C126 AH1-A5 | SPSYAYHQF | LWPRVTYHSPSYAYHQFERRAKYKR | Class I | H2-Ld | Balb/C | Mouse |
| | 8 | 17 | CT26 AH1-39 | MNKYAYHML | LWPRVTYHMNKYAYHMLERRAKYKR | Class I | H2-Ld | Balb/C | Mouse |
| | 11 | 20 | MC38 Dpagt1 | SIIVFNLL | GQSLVISASIIVFNLLELEGDYRDD | Class I | H2-Kb | B6 | Mouse |
| | 14 | 22 | MC38 Adpgk | ASMTNMELM | GIPVHLELASMTNMELMSSIVHQQV | Class I | H2-Db | B6 | Mouse |
| | 17 | 24 | MC38 Reps1 | AQLANDVVL | RVLELFRAAQLANDVVLQIMELCGA | Class I | H2-Db | B6 | Mouse |
| 8 | 20 | 27 | P815 P1A 35-44 | LPYLGWLVF | HRYSLEEILPYLGWLVFAVVTTSFL | Class I | H2-Ld | DBA/2 | Mouse |
| 11 | 22 | 29 | P815 P1E | GYCGLRGTGV | YLSKNPDGYCGLRGTGVSCPMAIKK | Class I | H2-Kd | DBA/2 | Mouse |
| 14 | 24 | 31 | Panc02 Mesothelir | LSIFKHKL | NEIPFTYEQLSIFKHKLDKTYPQGY | Class I | H2-Kb | B6 | Mouse |
| 17 | 26 | 33 | Panc02 Mesothelir | LIWIPALL | SRASLLGPGFVLIWIPALLPALRLS | Class I | H2-Kb | B6 | Mouse |
| 20 | 28 | 35 | ID8 FRa 161-169 | SSGHNECPV | NWHKGWNWSSGHNECPVGASCHPFT | Class I | H2-Kb | B6 | Mouse |
| 23 | 30 | 37 | ID8 Mesothelin 40 | GQKMNAQAI | KTLLKVSKGQKMNAQAIALVACYLR | Class I | H2-Db | B6 | Mouse |
| 26 | 32 | 39 | OVA-II | ISQAVHAAHAEINEAGR | ESLKISQAVHAAHAEINEAGREVVG | Class II | I-Ab, I-Ad | B6 | Mouse |
| 29 | 34 | 41 | ESAT-6 | MTEQQWNFAGIEAAASAIQ | MTEQQWNFAGIEAAASAIQGNVISI | Class II | I-Ab | B6 | Mouse |
| | 36 | 43 | TT p30 | FNNFTVSFWLRVPKVSASHL | DMFNNFTVSFWLRVPKVSASHLEQY | Class II | I-Ad | Balb/C | Mouse |
| | 39 | 46 | HEL | DGSTDYGILQINSRW | TNRNTDGSTDYGILQINSRWWCNDG | Class II | I-Ak | CBA | Mouse |
| | | 49 | MOG | MEVGWYRSPFSRVVHLYRN | TGMEVGWYRSPFSRVVHLYRNGKDQ | Class II | I-Ab | B6 | Mouse |

TABLE 40
Average IFNg+ cells in response to AH1 and
SIINFEKL (SEQ ID NO: 83) peptides in ChAd large
cassette treated mice. Data is presented as % of
total CD8 cells. Shown is average and standard
deviation per group and p-value by ANOVA with
Tukey's test. All p-values compared to MAG 20-
antigen cassette.

| # | | | Standard | p- | |
|---|---|---|---|---|---|
| antigens | Antigen | Average | deviation | value | N |
| 20 | SIINFEKL | 5.308 | 0.660 | n/a | 8 |
| | (SEQ ID | | | | |
| | NO: 83) | | | | |
| 30 | SIINFEKL | 4.119 | 1.019 | 0.978 | 8 |
| | (SEQ ID | | | | |
| | NO: 83) | | | | |
| 40 | SIINFEKL | 6.324 | 0.954 | 0.986 | 8 |
| | (SEQ ID | | | | |
| | NO: 83) | | | | |
| 50 | SIINFEKL | 8.169 | 1.469 | 0.751 | 8 |
| | (SEQ ID | | | | |
| | NO: 83) | | | | |
| 20 | AH1 | 6.405 | 2.664 | n/a | 8 |
| 30 | AH1 | 4.373 | 1.442 | 0.093 | 8 |
| 40 | AH1 | 4.126 | 1.135 | 0.050 | 8 |
| 50 | AH1 | 4.216 | 0.808 | 0.063 | 8 |

TABLE 41
Average tetramer+ cells for AH1 and SIINFEKL (SEQ
ID NO: 83) antigens in ChAd large cassette treated
mice. Data is presented as % of total CD8 cells.
Shown is average and standard deviation per group
and p-value by ANOVA with Tukey's test. All p-
values compared to MAG 20-antigen cassette.

| # | | | Standard | p- | |
|---|---|---|---|---|---|
| antigens | Antigen | Average | deviation | value | N |
| 20 | SIINFEKL | 10.314 | 2.384 | n/a | 8 |
| | (SEQ ID | | | | |
| | NO: 83) | | | | |
| 30 | SIINFEKL | 4.551 | 2.370 | 0.003 | 8 |
| | (SEQ ID | | | | |
| | NO: 83) | | | | |
| 40 | SIINFEKL | 5.186 | 3.254 | 0.009 | 8 |
| | (SEQ ID | | | | |
| | NO: 83) | | | | |
| 50 | SIINFEKL | 14.113 | 3.660 | 0.072 | 8 |
| | (SEQ ID | | | | |
| | NO: 83) | | | | |
| 20 | AH1 | 6.864 | 2.207 | n/a | 8 |
| 30 | AH1 | 4.713 | 0.922 | 0.036 | 8 |
| 40 | AH1 | 5.393 | 1.452 | 0.223 | 8 |
| 50 | AH1 | 5.860 | 1.041 | 0.543 | 8 |

TABLE 42
Average IFNg+ cells in response to AH1 and
SIINFEKL (SEQ ID NO: 83) peptides in SAM large
cassette treated mice. Data is presented as % of
total CD8 cells. Shown is average and standard
deviation per group and p-value by ANOVA with
Tukey's test. All p-values compared to MAG 20-
antigen cassette.

| # | | | Standard | p- | |
|---|---|---|---|---|---|
| antigens | Antigen | Average | deviation | value | N |
| 20 | SIINFEKL | 1.843 | 0.422 | n/a | 8 |
| | (SEQ ID | | | | |
| | NO: 83) | | | | |
| 30 | SIINFEKL | 2.112 | 0.522 | 0.879 | 7 |
| | (SEQ ID | | | | |
| | NO: 83) | | | | |
| 40 | SIINFEKL | 1.754 | 0.978 | 0.995 | 7 |
| | (SEQ ID | | | | |
| | NO: 83) | | | | |
| 50 | SIINFEKL | 1.409 | 0.766 | 0.606 | 8 |
| | (SEQ ID | | | | |
| | NO: 83) | | | | |
| 20 | AH1 | 3.050 | 0.909 | n/a | 8 |
| 30 | AH1 | 0.618 | 0.427 | 1.91E−05 | 7 |
| 40 | AH1 | 1.286 | 0.284 | 0.001 | 7 |
| 50 | AH1 | 1.309 | 1.149 | 0.001 | 8 |

### XV. ChAd Antigen Cassette Delivery Vector

[0479] XV.A. ChAd Antigen Cassette Delivery Vector Construction

[0480] In one example, Chimpanzee adenovirus (ChAd) was engineered to be a delivery vector for antigen cassettes. In a further example, a full-length ChAdV68 vector was synthesized based on AC_000011.1 (sequence 2 from U.S. Pat. No. 6,083,716) with E1 (nt 457 to 3014) and E3 (nt 27,816-31,332) sequences deleted. Reporter genes under the control of the CMV promoter/enhancer were inserted in place of the deleted E1 sequences. Transfection of this clone into HEK293 cells did not yield infectious virus. To confirm the sequence of the wild-type C68 virus, isolate VR-594 was obtained from the ATCC, passaged, and then independently sequenced (SEQ ID NO:10). When comparing the AC_000011.1 sequence to the ATCC VR-594 sequence (SEQ ID NO:10) of wild-type ChAdV68 virus, 6 nucleotide differences were identified. In one example, a modified ChAdV68 vector was generated based on AC_000011.1, with the corresponding ATCC VR-594 nucleotides substituted at five positions (ChAdV68.5WTnt SEQ ID NO:1).

[0481] In another example, a modified ChAdV68 vector was generated based on AC_000011.1 with E1 (nt 577 to 3403) and E3 (nt 27,816-31,332) sequences deleted and the corresponding ATCC VR-594 nucleotides substituted at four positions. A GFP reporter (ChAdV68.4WTnt.GFP; SEQ ID NO:11) or model neoantigen cassette (ChAdV68.4WTnt.MAG25mer; SEQ ID NO:12) under the control of the CMV promoter/enhancer was inserted in place of deleted E1 sequences.

[0482] In another example, a modified ChAdV68 vector was generated based on AC_000011.1 with E1 (nt 577 to 3403) and E3 (nt 27,125-31,825) sequences deleted and the corresponding ATCC VR-594 nucleotides substituted at five positions. A GFP reporter (ChAdV68.5WTnt.GFP; SEQ ID NO:13) or model neoantigen cassette (ChAdV68.5WTnt.MAG25mer; SEQ ID NO:2) under the control of the CMV promoter/enhancer was inserted in place of deleted E1 sequences

[0483] Relevant vectors are described below:
[0484] Full-Length ChAdVC68 sequence “ChAdV68.5WTnt” (SEQ ID NO:1); AC_000011.1 sequence with corresponding ATCC VR-594 nucleotides substituted at five positions.
[0485] ATCC VR594 C68 (SEQ I) NO:10); Independently sequenced; Full-Length C68
[0486] ChAdV684WTnt.GFP (SEQ ID NO:11); AC_000011.1 with E1 (nt 577 to 3403) and E3 (nt 27,816-31,332) sequences deleted; corresponding ATCC VR-594 nucleotides substituted at four positions: GFP reporter under the control of the CMV promoter/enhancer inserted in place of deleted E1
[0487] ChAdV68.4WTnt.MAG25mer (SEQ ID NO:12); AC_00011.1 with E1 (nt 577 to 3403) and E3 (nt 27,816-31,332) sequences deleted; corresponding ATCC VR-594 nucleotides substituted at four positions; model neoantigen cassette under the control of the CMV promoter/enhancer inserted in place of deleted E1
[0488] ChAdV68.5WTnt.GFP (SEQ ID NO:13); AC 000011.1 with E1 (nt 577 to 3403) and E3 (nt 27,125-31,825) sequences deleted; corresponding ATCC VR-594 nucleotides substituted at five positions; GFP reporter under the control of the CMV promoter/enhancer inserted in place of deleted E1

[0489] XV.B. ChAd Antigen Cassette Delivery Vector Testing

[0490] XV.B.1. ChAd Vector Evaluation Methods and Materials

### Transfection of HEK293A Cells Using Lipofectamine

[0491] DNA for the ChAdV68 constructs (ChAdV68.4WTnt.GFP, ChAdV68.5WTnt.GFP, ChAdV68.4WTnt.MAG25mer and ChAdV68.5WTnt.MAG25mer) was prepared and transfected into HEK293A cells using the following protocol.

[0492] 10 ug of plasmid DNA was digested with PacI to liberate the viral genome. DNA was then purified using GeneJet DNA cleanup Micro columns (Thermo Fisher) according to manufacturer's instructions for long DNA fragments, and eluted in 20 ul of pre-heated water; columns were left at 37 degrees for 0.5-1 hours before the elution step.

[0493] HEK293A cells were introduced into 6-well plates at a cell density of 10⁶ cells/well 14-18 hours prior to transfection. Cells were overlaid with 1 ml of fresh medium (DMEM-10% hiFBS with pen/strep and glutamate) per well. 1-2 ug of purified DNA was used per well in a transfection with twice the ul volume (2-4 ul) of Lipofectamine2000, according to the manufacturer's protocol. 0.5 ml of OPTI-MEM medium containing the transfection mix was added to the 1 ml of normal growth medium in each well, and left on cells overnight.

[0494] Transfected cell cultures were incubated at 37° C. for at least 5-7 days. If viral plaques were not visible by day 7 post-transfection, cells were split 1:4 or 1:6, and incubated at 37° C. to monitor for plaque development. Alternatively, transfected cells were harvested and subjected to 3 cycles of freezing and thawing and the cell lysates were used to infect HEK293A cells and the cells were incubated until virus plaques were observed.

Transfection of ChAdV68 Vectors into HEK293A Cells Using Calcium Phosphate and Generation of the Tertiary Viral Stock

[0495] DNA for the ChAdV68 constructs (ChAdV68.4WTnt.GFP, ChAdV68.5WTnt.GFP, ChAdV68.4WTnt.MAG25mer, ChAdV68.5WTnt.MAG25mer) was prepared and transfected into HEK293A cells using the following protocol.

[0496] HEK293A cells were seeded one day prior to the transfection at 10⁶ cells/well of a 6 well plate in 5% BS/DMEM/1XP/S, 1×Glutamax. Two wells are needed per transfection. Two to four hours prior to transfection the media was changed to fresh media. The ChAdV68.4WTnt.GFP plasmid was linearized with PacI. The linearized DNA was then phenol chloroform extracted and precipitated using one tenth volume of 3M Sodium acetate pH 5.3 and two volumes of 100% ethanol. The precipitated DNA was pelleted by centrifugation at 12,000×g for 5 min before washing 1× with 70% ethanol. The pellet was air dried and re-suspended in 50 μL of sterile water. The DNA concentration was determined using a NanoDrop™ (ThermoFisher) and the volume adjusted to 5 pg of DNA/50 μL.

[0497] 169 μL of sterile water was added to a microfuge tube. 5 μL of 2M CaCl₂) was then added to the water and mixed gently by pipetting. 50 μL of DNA was added dropwise to the CaCl₂) water solution. Twenty six μL of 2M CaCl₂) was then added and mixed gently by pipetting twice with a micro-pipetor. This final solution should consist of 5 μg of DNA in 250 μL of 0.25M CaCl₂). A second tube was then prepared containing 250 μL of 2×HBS (Hepes buffered solution). Using a 2 mL sterile pipette attached to a Pipet-Aid air was slowly bubbled through the 2×HBS solution. At the same time the DNA solution in the 0.25M CaCl₂) solution was added in a dropwise fashion. Bubbling was continued for approximately 5 seconds after addition of the final DNA droplet. The solution was then incubated at room temperature for up to 20 minutes before adding to 293A cells. 250 μL of the DNA/Calcium phosphate solution was added dropwise to a monolayer of 293A cells that had been seeded one day prior at 10⁶ cells per well of a 6 well plate. The cells were returned to the incubator and incubated overnight. The media was changed 24h later. After 72h the cells were split 1:6 into a 6 well plate. The monolayers were monitored daily by light microscopy for evidence of cytopathic effect (CPE). 7-10 days post transfection viral plaques were observed and the monolayer harvested by pipetting the media in the wells to lift the cells. The harvested cells and media were transferred to a 50 mL centrifuge tube followed by three rounds of freeze thawing (at −80° C. and 37° C.). The subsequent lysate, called the primary virus stock was clarified by centrifugation at full speed on a bench top centrifuge (4300×g) and a proportion of the lysate 10-50%) used to infect 293A cells in a T25 flask. The infected cells were incubated for 48h before harvesting cells and media at complete CPE. The cells were once again harvested, freeze thawed and clarified before using this secondary viral stock to infect a T150 flask seeded at 1.5×10⁷ cells per flask. Once complete CPE was achieved at 72h the media and cells were harvested and treated as with earlier viral stocks to generate a tertiary stock.

### Production in 293F Cells

[0498] ChAdV68 virus production was performed in 293F cells grown in 293 FreeStyle™ (ThermoFisher) media in an incubator at 8% CO₂. On the day of infection cells were diluted to 10⁶ cells per mL, with 98% viability and 400 mL were used per production run in 1 L Shake flasks (Corning). 4 mL of the tertiary viral stock with a target MOI of >3.3 was used per infection. The cells were incubated for 48-72h until the viability was <70% as measured by Trypan blue. The infected cells were then harvested by centrifugation, full speed bench top centrifuge and washed in 1×PBS, re-centrifuged and then re-suspended in 20 mL of 10 mM Tris pH7.4. The cell pellet was lysed by freeze thawing 3× and clarified by centrifugation at 4,300×g for 5 minutes.

### Purification by CsCl Centrifugation

[0499] Viral DNA was purified by CsCl centrifugation. Two discontinuous gradient runs were performed. The first to purify virus from cellular components and the second to further refine separation from cellular components and separate defective from infectious particles.

[0500] 10 mL of 1.2 (26.8 g CsCl dissolved in 92 mL of 10 mM Tris pH 8.0) CsCl was added to polyallomer tubes. Then 8 mL of 1.4 CsCl (53 g CsCl dissolved in 87 mL of 10 mM Tris pH 8.0) was carefully added using a pipette delivering to the bottom of the tube. The clarified virus was carefully layered on top of the 1.2 layer. If needed more 10 mM Tris was added to balance the tubes. The tubes were then placed in a SW-32Ti rotor and centrifuged for 2h 30 min at 10° C. The tube was then removed to a laminar flow cabinet and the virus band pulled using an 18 gauge needle and a 10 mL syringe. Care was taken not to remove contaminating host cell DNA and protein. The band was then diluted at least 2× with 10 mM Tris pH 8.0 and layered as before on a discontinuous gradient as described above. The run was performed as described before except that this time the run was performed overnight. The next day the band was pulled with care to avoid pulling any of the defective particle band. The virus was then dialyzed using a Slide-a-Lyzer™ Cassette (Pierce) against ARM buffer (20 mM Tris pH 8.0, 25 mM NaCl, 2.5% Glycerol). This was performed 3×, 1h per buffer exchange. The virus was then aliquoted for storage at −80° C.

### Viral Assays

[0501] VP concentration was performed by using an OD 260 assay based on the extinction coefficient of 1.1×10¹² viral particles (VP) is equivalent to an Absorbance value of 1 at OD260 nm. Two dilutions (1:5 and 1:10) of adenovirus were made in a viral lysis buffer (0.1% SDS, 10 mM Tris pH 7.4, 1 mM EDTA). OD was measured in duplicate at both dilutions and the VP concentration/mL was measured by multiplying the OD260 value X dilution factor X 1.1×10¹²VP.

[0502] An infectious unit (IU) titer was calculated by a limiting dilution assay of the viral stock. The virus was initially diluted 100× in DMEM/5% NS/1× PS and then subsequently diluted using 10-fold dilutions down to 1×10⁷. 100 μL of these dilutions were then added to 293A cells that were seeded at least an hour before at 3ₑ5 cells/well of a 24 well plate. This was performed in duplicate. Plates were incubated for 48h in a CO₂ (5%) incubator at 37° C. The cells were then washed with 1×PBS and were then fixed with 100% cold methanol (−20° C.). The plates were then incubated at −20° C. for a minimum of 20 minutes. The wells were washed with 1×PBS then blocked in 1×PBS/0.1% BSA for 1 h at room temperature. A rabbit anti-Ad antibody (Abcam, Cambridge, Mass.) was added at 1:8,000 dilution in blocking buffer (0.25 ml per well) and incubated for 1 h at room temperature. The wells were washed 4× with 0.5 mL PBS per well. A HRP conjugated Goat anti-Rabbit antibody (Bethyl Labs, Montgomery Tex.) diluted 1000× was added per well and incubated for 1h prior to a final round of washing. 5 PBS washes were performed and the plates were developed using DAB (Diaminobenzidine tetrahydrochloride) substrate in Tris buffered saline (0.67 mg/mL DAB in 50 mM Tris pH 7.5, 150 mM NaCl) with 0.01% H₂O₂. Wells were developed for 5 min prior to counting. Cells were counted under a 10× objective using a dilution that gave between 4-40 stained cells per field of view. The field of view that was used was a 0.32 mm² grid of which there are equivalent to 625 per field of view on a 24 well plate. The number of infectious viruses/mL can be determined by the number of stained cells per grid multiplied by the number of grids per field of view multiplied by a dilution factor 10. Similarly, when working with GFP expressing cells florescent can be used rather than capsid staining to determine the number of GFP expressing virions per mL.

### Immunizations

[0503] C57BL/6J female mice and Balb/c female mice were injected with 1×10⁸ viral particles (VP) of ChAdV68.5WTnt.MAG25mer in 100 uL volume, bilateral intramuscular injection (50 uL per leg).

### Splenocyte Dissociation

[0504] Spleen and lymph nodes for each mouse were pooled in 3 mL of complete RPMI (RPMI, 10% FBS, penicillin/streptomycin). Mechanical dissociation was performed using the gentleMACS Dissociator (Miltenyi Biotec), following manufacturer's protocol. Dissociated cells were filtered through a 40 micron filter and red blood cells were lysed with ACK lysis buffer (150 mM NH₄Cl, 10 mM KHCO₃, 0.1 mM Na₂EDTA). Cells were filtered again through a 30 micron filter and then resuspended in complete RPMI. Cells were counted on the Attune NxT flow cytometer (Thermo Fisher) using propidium iodide staining to exclude dead and apoptotic cells. Cell were then adjusted to the appropriate concentration of live cells for subsequent analysis.

### Ex Vivo Enzyme-Linked Immunospot (ELISPOT) Analysis

[0505] ELISPOT analysis was performed according to ELISPOT harmonization guidelines {DOI: 10.1038/nprot.2015.068} with the mouse IFNg ELISpotPLUS kit (MABTECH). 5×10⁴ splenocytes were incubated with 10 uM of the indicated peptides for 16 hours in 96-well IFNg antibody coated plates. Spots were developed using alkaline phosphatase. The reaction was timed for 10 minutes and was terminated by running plate under tap water. Spots were counted using an AID vSpot Reader Spectrum. For ELISPOT analysis, wells with saturation >50% were recorded as “too numerous to count”. Samples with deviation of replicate wells >10% were excluded from analysis. Spot counts were then corrected for well confluency using the formula: spot count+2×(spot count×% confluence/[100%−% confluence]). Negative background was corrected by subtraction of spot counts in the negative peptide stimulation wells from the antigen stimulated wells. Finally, wells labeled too numerous to count were set to the highest observed corrected value, rounded up to the nearest hundred.

[0506] XV.B.2. Production of ChAdV68 Viral Delivery Particles after DNA Transfection

[0507] In one example, ChAdV68.4WTnt.GFP (FIG. 7) and ChAdV68.5WTnt.GFP (FIG. 8) DNA was transfected into HEK293A cells and virus replication (viral plaques) was observed 7-10 days after transfection. ChAdV68 viral plaques were visualized using light (FIGS. 7A and 8A) and fluorescent microscopy (FIG. 7B-C and FIG. 8B-C). GFP denotes productive ChAdV68 viral delivery particle production.

[0508] XV.B.3. ChAdV68 Viral Delivery Particles Expansion

[0509] In one example, ChAdV68.4WTnt.GFP, ChAdV68.5WTnt.GFP, and ChAdV68.5WTnt.MAG25mer viruses were expanded in HEK293F cells and a purified virus stock produced 18 days after transfection (FIG. 9). Viral particles were quantified in the purified ChAdV68 virus stocks and compared to adenovirus type 5 (Ad5) and ChAdVY25 (a closely related ChAdV; Dicks, 2012, PloS ONE 7, e40385) viral stocks produced using the same protocol. ChAdV68 viral titers were comparable to Ad5 and ChAdVY25 (Table 7).

TABLE 7
Adenoviral vector production in 293F suspension cells

| Construct | Average VP/cell +/− SD |
|---|---|
| Ad5-Vectors (Multiple vectors) | 2.96e4 +/− 2.26e4 |
| Ad5-GFP | 3.89e4 |
| chAdY25-GFP | 1.75e3 +/− 6.03e1 |
| ChAdV68.4WTnt.GFP | 1.2e4 +/− 6.5e3 |
| ChAdV68.5WTnt.GFP | 1.8e3 |
| ChAdV68.5WTnt.MAG25mer | 1.39e3 +/− 1.1e3 |

*SD is only reported where multiple Production runs have been performed

[0510] XV.B.4. Evaluation of Immunogenicity in Tumor Models

[0511] C68 vector expressing mouse tumor antigens were evaluated in mouse immunogenicity studies to demonstrate the C68 vector elicits T-cell responses. T-cell responses to the MHC class I epitope SIINFEKL (SEQ ID NO: 83) were measured in C57BL/6J female mice and the MHC class I epitope AH1-A5 (Slansky et al., 2000, Immunity 13:529-538) measured in Balb/c mice. As shown in FIG. 15, strong T-cell responses relative to control were measured after immunization of mice with ChAdV68.5WTnt.MAG25mer. Mean cellular immune responses of 8957 or 4019 spot forming cells (SFCs) per 10⁶ splenocytes were observed in ELISpot assays when C57BL/6J or Balb/c mice were immunized with ChAdV68.5WTnt.MAG25mer, respectively, 10 days after immunization.

[0512] Tumor infiltrating lymphocytes were also evaluated in CT26 tumor model evaluating ChAdV and co-administration of a an anti-CTLA4 antibody. Mice were implanted with CT26 tumors cells and 7 days after implantation, were immunized with ChAdV vaccine and treated with anti-CTLA4 antibody (clone 9D9) or IgG as a control. Tumor infiltrating lymphocytes were analyzed 12 days after immunization. Tumors from each mouse were dissociated using the gentleMACS Dissociator (Miltenyi Biotec) and mouse tumor dissociation kit (Miltenyi Biotec). Dissociated cells were filtered through a 30 micron filter and resuspended in complete RPMI. Cells were counted on the Attune NxT flow cytometer (Thermo Fisher) using propidium iodide staining to exclude dead and apoptotic cells. Cell were then adjusted to the appropriate concentration of live cells for subsequent analysis. Antigen specific cells were identified by MHC-tetramer complexes and co-stained with anti-CD8 and a viability marker. Tumors were harvested 12 days after prime immunization.

[0513] Antigen-specific CD8+ T cells cells within the tumor comprised a median of 3.3%, 2.2%, or 8.1% of the total live cell population in ChAdV, anti-CTLA4, and ChAdV+ anti-CTLA4 treated groups, respectively (FIG. 44 and Table 36). Treatment with anti-CTLA in combination with active ChAdV immunization resulted in a statistically significant increase in the antigen-specific CD8+ T cell frequency over both ChAdV alone and anti-CTLA4 alone demonstrating anti-CTLA4, when co-administered with the chAd68 vaccine, increased the number of infiltrating T cells within a tumor.

TABLE 36
Tetramer+ infiltrating CD8 T cell frequencies in CT26 tumors

| Treatment | Median % tetramer+ |
|---|---|
| ChAdV68.5WTnt.MAG25mer | 3.3 |
| (ChAdV) | |
| Anti-CTLA4 | 2.2 |
| ChAdV68.5WTnt.MAG25mer | 8.1 |
| (ChAdV) + anti-CTLA4 | |

### XVI. Alphavirus Antigen Cassette Delivery Vector

[0514] XVI.A. Alphavirus Delivery Vector Evaluation Materials and Methods

### In Vitro Transcription to Generate RNA

[0515] For in vitro testing: plasmid DNA was linearized by restriction digest with PmeI, column purified following manufacturer's protocol (GeneJet DNA cleanup kit, Thermo) and used as template. In vitro transcription was performed using the RiboMAX Large Scale RNA production System (Promega) with the m⁷G cap analog (Promega) according to manufacturer's protocol. mRNA was purified using the RNeasy kit (Qiagen) according to manufacturer's protocol.

[0516] For in vivo studies: RNA was generated and purified by TriLnk Biotechnologies and capped with Enzymatic Capi.

### Transfection of RNA

[0517] HEK293A cells were seeded at 6e4 cells/well for 96 wells and 2e5 cells/well for 24 wells, ˜16 hours prior to transfection. Cells were transfected with mRNA using MessengerMAX lipofectamine (Invitrogen) and following manufacturer's protocol. For 96-wells, 0.15 uL of lipofectamine and 10 ng of mRNA was used per well, and for 24-wells, 0.75 uL of lipofectamine and 150 ng of mRNA was used per well. A GFP expressing mRNA (TriLink Biotechnologies) was used as a transfection control.

### Luciferase Assay

[0518] Luciferase reporter assay was performed in white-walled 96-well plates with each condition in triplicate using the ONE-Glo luciferase assay (Promega) following manufacturer's protocol. Luminescence was measured using the SpectraMax.

qRT-PCR

[0519] Transfected cells were rinsed and replaced with fresh media 2 hours post transfection to remove any untransfected mRNA. Cells were then harvested at various timepoints in RLT plus lysis buffer (Qiagen), homogenized using a QiaShredder (Qiagen) and RNA was extracted using the RNeasy kit (Qiagen), all according to manufacturer's protocol. Total RNA was quantified using a Nanodrop (Thermo Scientific). qRT-PCR was performed using the Quantitect Probe One-Step RT-PCR kit (Qiagen) on the qTower³ (Analytik Jena) according to manufacturer's protocol, using 20 ng of total RNA per reaction. Each sample was run in triplicate for each probe. Actin or GusB were used as reference genes. Custom primer/probes were generated by IDT (Table 8).

TABLE 8
qPCR primers/probes

| Target | | |
|---|---|---|
| Luci | Primer1 | GTGGTGTGCAGCGAGAATAG |
| | | (SEQ ID NO: 97) |
| | Primer2 | CGCTCGTTGTAGATGTCGTTAG |
| | | (SEQ ID NO: 98) |
| | Probe | /56-FAM/TTGCAGTTC/ZEN/ |
| | | TTCATGCCCGTGTTG/3IABkFQ/ |
| | | (SEQ ID NO: 99) |
| GusB | Primer1 | GTTTTTGATCCAGACCCAGATG |
| | | (SEQ ID NO: 100) |
| | Primer2 | GCCCATTATTCAGAGCGAGTA |
| | | (SEQ ID NO: 101) |
| | Probe | /56-FAM/TGCAGGGTT/ZEN/ |
| | | TCACCAGGATCCAC/3IABkFQ/ |
| | | (SEQ ID NO: 102) |
| ActB | Primer1 | CCTTGCACATGCCGGAG |
| | | (SEQ ID NO: 103) |
| | Primer2 | ACAGAGCCTCGCCTTTG |
| | | (SEQ ID NO: 104) |
| | Probe | /56-FAM/TCATCCATG/ZEN/ |
| | | GTGAGCTGGCGG/3IABkFQ/ |
| | | (SEQ ID NO: 105) |
| MAG- | Primer1 | CTGAAAGCTCGGTTTGCTAATG |
| 25mer | | (SEQ ID NO: 106) |
| Set1 | Primer2 | CCATGCTGGAAGAGACAATCT |
| | | (SEQ ID NO: 107) |
| | Probe | /56-FAM/CGTTTCTGA/ZEN/ |
| | | TGGCGCTGACCGATA/3IABkFQ/ |
| | | (SEQ ID NO: 108) |
| MAG- | Primer1 | TATGCCTATCCTGTCTCCTCTG |
| 25mer | | (SEQ ID NO: 109) |
| Set2 | Primer2 | GCTAATGCAGCTAAGTCCTCTC |
| | | (SEQ ID NO: 110) |
| | Probe | /56-FAM/TGTTTACCC/ZEN/ |
| | | TGACCGTGCCTTCTG/3IABkFQ/ |
| | | (SEQ ID NO: 111) |

### B16—OVA Tumor Model

[0520] C57BL/6J mice were injected in the lower left abdominal flank with 10⁵B16—OVA cells/animal. Tumors were allowed to grow for 3 days prior to immunization.

### CT26 Tumor Model

[0521] Balb/c mice were injected in the lower left abdominal flank with 10⁶ CT26 cells/animal. Tumors were allowed to grow for 7 days prior to immunization.

### Immunizations

[0522] For srRNA vaccine, mice were injected with 10 ug of RNA in 100 uL volume, bilateral intramuscular injection (50 uL per leg). For Ad5 vaccine, mice were injected with 5×10¹⁰ viral particles (VP) in 100 uL volume, bilateral intramuscular injection (50 uL per leg). Animals were injected with anti-CTLA-4 (clone 9D9, BioXcell), anti-PD-1 (clone RMP1-14, BioXcell) or anti-IgG (clone MPC-11, BioXcell), 250 ug dose, 2 times per week, via intraperitoneal injection.

### In Vivo Bioluminescent Imaging

[0523] At each timepoint mice were injected with 150 mg/kg luciferin substrate via intraperitoneal injection and bioluminescence was measured using the IVIS In vivo imaging system (PerkinElmer) 10-15 minutes after injection.

### Splenocyte Dissociation

[0524] Spleen and lymph nodes for each mouse were pooled in 3 mL of complete RPMI (RPMI, 10% FBS, penicillin/streptomycin). Mechanical dissociation was performed using the gentleMACS Dissociator (Miltenyi Biotec), following manufacturer's protocol. Dissociated cells were filtered through a 40 micron filter and red blood cells were lysed with ACK lysis buffer (150 mM NH₄Cl, 10 mM KHCO₃, 0.1 mM Na₂EDTA). Cells were filtered again through a 30 micron filter and then resuspended in complete RPMI. Cells were counted on the Attune NxT flow cytometer (Thermo Fisher) using propidium iodide staining to exclude dead and apoptotic cells. Cell were then adjusted to the appropriate concentration of live cells for subsequent analysis.

### Ex Vivo Enzyme-Linked Immunospot (ELISPOT) Analysis

[0525] ELISPOT analysis was performed according to ELISPOT harmonization guidelines {DOI. 10.1038/nprot.2015.068} with the mouse IFNg ELISpotPLUS kit (MABTECH). 5×10⁴ splenocytes were incubated with 10 uM of the indicated peptides for 16 hours in 96-well IFNg antibody coated plates. Spots were developed using alkaline phosphatase. The reaction was timed for 10 minutes and was terminated by running plate under tap water. Spots were counted using an AID vSpot Reader Spectrum. For ELISPOT analysis, wells with saturation >50% were recorded as “too numerous to count”. Samples with deviation of replicate wells >10% were excluded from analysis. Spot counts were then corrected for well confluency using the formula: spot count+2×(spot count×% confluence/[100%−% confluence]). Negative background was corrected by subtraction of spot counts in the negative peptide stimulation wells from the antigen stimulated wells. Finally, wells labeled too numerous to count were set to the highest observed corrected value, rounded up to the nearest hundred.

[0526] XV.B. Alphavirus Vector

[0527] XVI.B.1. Alphavirus Vector in vitro Evaluation

[0528] In one implementation of the present invention, a RNA alphavirus backbone for the antigen expression system was generated from a Venezuelan Equine Encephalitis (VEE) (Kinney, 1986, Virology 152: 400-413) based self-replicating RNA (srRNA) vector. In one example, the sequences encoding the structural proteins of VEE located 3′ of the 26S sub-genomic promoter were deleted (VEE sequences 7544 to 11,175 deleted; numbering based on Kinney et al 1986; SEQ ID NO:6) and replaced by antigen sequences (SEQ ID NO:14 and SEQ ID NO:4) or a luciferase reporter (e.g., VEE-Luciferase, SEQ ID NO:15) (FIG. 10). RNA was transcribed from the srRNA DNA vector in vitro, transfected into HEK293A cells and luciferase reporter expression was measured. In addition, an (non-replicating) mRNA encoding luciferase was transfected for comparison. An ˜30,000-fold increase in srRNA reporter signal was observed for VEE-Luciferase srRNA when comparing the 23 hour measurement vs the 2 hour measurement (Table 9). In contrast, the mRNA reporter exhibited a less than 10-fold increase in signal over the same time period (Table 9).

TABLE 9
Expression of luciferase from VEE self-replicating vector increases
over time. HEK293A cells transfected with 10 ng of VEE-Luciferase
srRNA or 10 ng of non-replicating luciferase mRNA (TriLink
L-6307) per well in 96 wells. Luminescence was measured at
various times post transfection. Luciferase expression is
reported as relative luminescence units (RLU). Each data point
is the mean +/− SD of 3 transfected wells.

| | Timepoint | | Standard Dev |
|---|---|---|---|
| Construct | (hr) | Mean RLU | (triplicate wells) |
| mRNA | 2 | 878.6666667 | 120.7904522 |
| mRNA | 5 | 1847.333333 | 978.515372 |
| mRNA | 9 | 4847 | 868.3271273 |
| mRNA | 23 | 8639.333333 | 751.6816702 |
| SRRNA | 2 | 27 | 15 |
| SRRNA | 5 | 4884.333333 | 2955.158935 |
| SRRNA | 9 | 182065.5 | 16030.81784 |
| SRRNA | 23 | 783658.3333 | 68985.05538 |

[0529] In another example, replication of the srRNA was confirmed directly by measuring RNA levels after transfection of either the luciferase encoding srRNA (VEE-Luciferase) or an srRNA encoding a multi-epitope cassette (VEE-MAG25mer) using quantitative reverse transcription polymerase chain reaction (qRT-PCR). An ˜150-fold increase in RNA was observed for the VEE-luciferase srRNA (Table 10), while a 30-50-fold increase in RNA was observed for the VEE-MAG25mer srRNA (Table 11). These data confirm that the VEE srRNA vectors replicate when transfected into cells.

TABLE 10
Direct measurement of RNA replication in VEE-Luciferase srRNA
transfected cells. HEK293A cells transfected with VEE-Luciferase
srRNA (150 ng per well, 24-well) and RNA levels quantified
by qRT-PCR at various times after transfection. Each measurement
was normalized based on the Actin reference gene and fold-change
relative to the 2 hour timepoint is presented.

| Timepoint | Luciferase | Actin | | Ref | | Relative Fold |
|---|---|---|---|---|---|---|
| (hr) | Ct | Ct | dCt | dCt | ddCt | change |
| 2 | 20.51 | 18.14 | 2.38 | 2.38 | 0.00 | 1.00 |
| 4 | 20.09 | 18.39 | 1.70 | 2.38 | −0.67 | 1.59 |
| 6 | 15.50 | 18.19 | −2.69 | 2.38 | −5.07 | 33.51 |
| 8 | 13.51 | 18.36 | −4.85 | 2.38 | −7.22 | 149.43 |

TABLE 11
Direct measurement of RNA replication in VEE-MAG25mer srRNA
transfected cells. HEK293 cells transfected with VEE-MAG25mer
srRNA (150 ng per well, 24-well) and RNA levels quantified
by qRT-PCR at various times after transfection. Each measurement
was normalized based on the GusB reference gene and fold-
change relative to the 2 hour timepoint is presented. Different
lines on the graph represent 2 different qPCR primer/probe
sets, both of which detect the epitope cassette region
of the srRNA.

| Primer/ | Timepoint | | GusB | | Ref | | Relative |
|---|---|---|---|---|---|---|---|
| probe | (hr) | Ct | Ct | dCt | dCt | ddCt | Fold-Change |
| Set1 | 2 | 18.96 | 22.41 | −3.45 | −3.45 | 0.00 | 1.00 |
| Set1 | 4 | 17.46 | 22.27 | −4.81 | −3.45 | −1.37 | 2.58 |
| Set1 | 6 | 14.87 | 22.04 | −7.17 | −3.45 | −3.72 | 13.21 |
| Set1 | 8 | 14.16 | 22.19 | −8.02 | −3.45 | −4.58 | 23.86 |
| Set1 | 24 | 13.16 | 22.01 | −8.86 | −3.45 | −5.41 | 42.52 |
| Set1 | 36 | 13.53 | 22.63 | −9.10 | −3.45 | −5.66 | 50.45 |
| Set2 | 2 | 17.75 | 22.41 | −4.66 | −4.66 | 0.00 | 1.00 |
| Set2 | 4 | 16.66 | 22.27 | −5.61 | −4.66 | −0.94 | 1.92 |
| Set2 | 6 | 14.22 | 22.04 | −7.82 | −4.66 | −3.15 | 8.90 |
| Set2 | 8 | 13.18 | 22.19 | −9.01 | −4.66 | −4.35 | 20.35 |
| Set2 | 24 | 12.22 | 22.01 | −9.80 | −4.66 | −5.13 | 35.10 |
| Set2 | 36 | 13.08 | 22.63 | −9.55 | −4.66 | −4.89 | 29.58 |

[0530] XVI.B.2. Alphavirus Vector In Vivo Evaluation

[0531] In another example, VEE-Luciferase reporter expression was evaluated in vivo. Mice were injected with 10 ug of VEE-Luciferase srRNA encapsulated in lipid nanoparticle (MC3) and imaged at 24 and 48 hours, and 7 and 14 days post injection to determine bioluminescent signal. Luciferase signal was detected at 24 hours post injection and increased overtime and appeared to peak at 7 days after srRNA injection (FIG. 11).

[0532] XVI.B.3. Alphavirus Vector Tumor Model Evaluation

[0533] In one implementation, to determine if the VEE srRNA vector directs antigen-specific immune responses in vivo, a VEE srRNA vector was generated (VEE-UbAAY, SEQ ID NO:14) that expresses 2 different MHC class I mouse tumor epitopes, SIINFEKL (SEQ ID NO: 83) and AH1-A5 (Slansky et al., 2000, Immunity 13:529-538). The SFL (SIINFEKL (SEQ ID NO: 83)) epitope is expressed by the B16—OVA melanoma cell line, and the AH1-A5 (SPSYAYHQF (SEQ ID NO: 84); Slansky et al., 2000, Immunity) epitope induces T cells targeting a related epitope (AH1/SPSYVYHQF (SEQ ID NO: 112); Huang et al., 1996, Proc Natl Acad Sci USA 93:9730-9735) that is expressed by the CT26 colon carcinoma cell line. In one example, for in vivo studies, VEE-UbAAY srRNA was generated by in vitro transcription using T7 polymerase (TriLink Biotechnologies) and encapsulated in a lipid nanoparticle (MC3).

[0534] A strong antigen-specific T-cell response targeting SFL, relative to control, was observed two weeks after immunization of B16—OVA tumor bearing mice with MC3 formulated VEE-UbAAY srRNA. In one example, a median of 3835 spot forming cells (SFC) per 10⁶ splenocytes was measured after stimulation with the SFL peptide in ELISpot assays (FIG. 12A, Table 12) and 1.8% (median) of CD8 T-cells were SFL antigen-specific as measured by pentamer staining (FIG. 12B, Table 12). In another example, co-administration of an anti-CTLA-4 monoclonal antibody (mAb) with the VEE srRNA vaccine resulted in a moderate increase in overall T-cell responses with a median of 4794.5 SFCs per 10⁶ splenocytes measured in the ELISpot assay (FIG. 12A, Table 12).

TABLE 12
Results of ELISPOT and MHCI-pentamer staining assays 14 days post
VEE srRNA immunization in B16-OVA tumor bearing C57BL/6J mice.

| | | | Pentamer | | | | Pentamer |
|---|---|---|---|---|---|---|---|
| | | SFC/1e6 | positive | | | SFC/1e6 | positive |
| Group | Mouse | splenocytes | (% of CD8) | Group | Mouse | splenocytes | (% of CD8) |
| Control | 1 | 47 | 0.22 | Vax | 1 | 6774 | 4.92 |
| | 2 | 80 | 0.32 | | 2 | 2323 | 1.34 |
| | 3 | 0 | 0.27 | | 3 | 2997 | 1.52 |
| | 4 | 0 | 0.29 | | 4 | 4492 | 1.86 |
| | 5 | 0 | 0.27 | | 5 | 4970 | 3.7 |
| | 6 | 0 | 0.25 | | 6 | | 4.13 |
| | 7 | 0 | 0.23 | | 7 | 3835 | 1.66 |
| | 8 | 87 | 0.25 | | 8 | 3119 | 1.64 |
| aCTLA4 | 1 | 0 | 0.24 | Vax + | 1 | 6232 | 2.16 |
| | 2 | 0 | 0.26 | aCTLA4 | 2 | 4242 | 0.82 |
| | 3 | 0 | 0.39 | | 3 | 5347 | 1.57 |
| | 4 | 0 | 0.28 | | 4 | 6568 | 2.33 |
| | 5 | 0 | 0.28 | | 5 | 6269 | 1.55 |
| | 6 | 0 | 0.28 | | 6 | 4056 | 1.74 |
| | 7 | 0 | 0.31 | | 7 | 4163 | 1.14 |
| | 8 | 6 | 0.26 | | 8 | 3667 | 1.01 |

* Note that results from mouse #6 in the Vax group were excluded from analysis due to high variability between triplicate wells.

*Note that results from mouse #6 in the Vax group were excluded from analysis due to high variability between triplicate wells.

[0535] In another implementation, to mirror a clinical approach, a heterologous prime/boost in the B16—OVA and CT26 mouse tumor models was performed, where tumor bearing mice were immunized first with adenoviral vector expressing the same antigen cassette (Ad5-UbAAY), followed by a boost immunization with the VEE-UbAAY srRNA vaccine 14 days after the Ad5-UbAAY prime. In one example, an antigen-specific immune response was induced by the Ad5-UbAAY vaccine resulting in 7330 (median) SFCs per 10⁶ splenocytes measured in the ELISpot assay (FIG. 13A, Table 13) and 2.9% (median) of CD8 T-cells targeting the SFL antigen as measured by pentamer staining (FIG. 13C, Table 13). In another example, the T-cell response was maintained 2 weeks after the VEE-UbAAY srRNA boost in the B16—OVA model with 3960 (median) SFL-specific SFCs per 10⁶ splenocytes measured in the ELISpot assay (FIG. 13B, Table 13) and 3.1% (median) of CD8 T-cells targeting the SFL antigen as measured by pentamer staining (FIG. 13D, Table 13).

TABLE 13
Immune monitoring of B16-OVA mice following heterologous
prime/boost with Ad5 vaccine prime and srRNA boost.

| | | | | | | | |
|---|---|---|---|---|---|---|---|
| | | | Pentamer | | | | Pentamer |
| | | SFC/1e6 | positive | | | SFC/1e6 | positive |
| Group | Mouse | splenocytes | (% of CD8) | Group | Mouse | splenocytes | (% of CD8) |

Day 14

| | | | | | | | |
|---|---|---|---|---|---|---|---|
| Control | 1 | 0 | 0.10 | Vax | 1 | 8514 | 1.87 |
| | 2 | 0 | 0.09 | | 2 | 7779 | 1.91 |
| | 3 | 0 | 0.11 | | 3 | 6177 | 3.17 |
| | 4 | 46 | 0.18 | | 4 | 7945 | 3.41 |
| | 5 | 0 | 0.11 | | 5 | 8821 | 4.51 |
| | 6 | 16 | 0.11 | | 6 | 6881 | 2.48 |
| | 7 | 0 | 0.24 | | 7 | 5365 | 2.57 |
| | 8 | 37 | 0.10 | | 8 | 6705 | 3.98 |
| aCTLA4 | 1 | 0 | 0.08 | Vax + | 1 | 9416 | 2.35 |
| | 2 | 29 | 0.10 | aCTLA4 | 2 | 7918 | 3.33 |
| | 3 | 0 | 0.09 | | 3 | 10153 | 4.50 |
| | 4 | 29 | 0.09 | | 4 | 7212 | 2.98 |
| | 5 | 0 | 0.10 | | 5 | 11203 | 4.38 |
| | 6 | 49 | 0.10 | | 6 | 9784 | 2.27 |
| | 7 | 0 | 0.10 | | 8 | 7267 | 2.87 |
| | 8 | 31 | 0.14 | | | | |

Day 28

| | | | | | | | |
|---|---|---|---|---|---|---|---|
| Control | 2 | 0 | 0.17 | Vax | 1 | 5033 | 2.61 |
| | 4 | 0 | 0.15 | | 2 | 3958 | 3.08 |
| | 6 | 20 | 0.17 | | 4 | 3960 | 3.58 |
| aCTLA4 | 1 | 7 | 0.23 | Vax + | 4 | 3460 | 2.44 |
| | 2 | 0 | 0.18 | aCTLA4 | 5 | 5670 | 3.46 |
| | 3 | 0 | 0.14 | | | | |

[0536] In another implementation, similar results were observed after an Ad5-UbAAY prime and VEE-UbAAY srRNA boost in the CT26 mouse model. In one example, an AH1 antigen-specific response was observed after the Ad5-UbAAY prime (day 14) with a mean of 5187 SFCs per 10⁶ splenocytes measured in the ELISpot assay (FIG. 14A, Table 14) and 3799 SFCs per 10⁶ splenocytes measured in the ELISpot assay after the VEE-UbAAY srRNA boost (day 28) (FIG. 14B, Table 14).

TABLE 14
Immune monitoring after heterologous prime/boost
in CT26 tumor mouse model.

| Day 12 | | | Day 21 | | |
|---|---|---|---|---|---|
| | | SFC/1e6 | | | SFC/1e6 |
| Group | Mouse | splenocytes | Group | Mouse | splenocytes |
| Control | 1 | 1799 | Control | 9 | 167 |
| | 2 | 1442 | | 10 | 115 |
| | 3 | 1235 | | 11 | 347 |
| aPD1 | 1 | 737 | aPD1 | 8 | 511 |
| | 2 | 5230 | | 11 | 758 |
| | 3 | 332 | Vax | 9 | 3133 |
| Vax | 1 | 6287 | | 10 | 2036 |
| | 2 | 4086 | | 11 | 6227 |
| Vax + | 1 | 5363 | Vax + | 8 | 3844 |
| aPD1 | 2 | 6500 | aPD1 | 9 | 2071 |
| | | | | 11 | 4888 |

### XVII. ChAdV/srRNA Combination Tumor Model Evaluation

[0537] Various dosing protocols using ChAdV68 and self-replicating RNA (srRNA) were evaluated in murine CT26 tumor models.

[0538] XVII.A ChAdV/srRNA Combination Tumor Model Evaluation Methods and Materials

### Tumor Injection

[0539] Balb/c mice were injected with the CT26 tumor cell line. 7 days after tumor cell injection, mice were randomized to the different study arms (28-40 mice per group) and treatment initiated. Balb/c mice were injected in the lower left abdominal flank with 10⁶ CT26 cells/animal. Tumors were allowed to grow for 7 days prior to immunization. The study arms are described in detail in Table 15.

TABLE 15
ChAdV/srRNA Combination Tumor Model Evaluation Study Arms

| Group | N | Treatment | Dose | | Volume | | Schedule | Route |
|---|---|---|---|---|---|---|---|---|
| 1 | 40 | chAd68 control | 1e11 | vp | 2x 50 | uL | day 0 | IM |
| | | srRNA control | 10 | ug | 50 | uL | day 14, 28, 42 | IM |
| | | Anti-PD1 | 250 | ug | 100 | uL | 2x/week (start day 0) | IP |
| 2 | 40 | chAd68 control | 1e11 | vp | 2x 50 | uL | day 0 | IM |
| | | srRNA control | 10 | ug | 50 | uL | day 14, 28, 42 | IM |
| | | Anti-IgG | 250 | ug | 100 | uL | 2x/week (start day 0) | IP |
| 3 | 28 | chAd68 vaccine | 1e11 | vp | 2x 50 | uL | day 0 | IM |
| | | srRNA vaccine | 10 | ug | 50 | uL | day 14, 28, 42 | IM |
| | | Anti-PD1 | 250 | ug | 100 | uL | 2x/week (start day 0) | IP |
| 4 | 28 | chAd68 vaccine | 1e11 | vp | 2x 50 | uL | day 0 | IM |
| | | srRNA vaccine | 10 | ug | 50 | uL | day 14, 28, 42 | IM |
| | | Anti-IgG | 250 | ug | 100 | uL | 2x/week (start day 0) | IP |
| 5 | 28 | srRNA vaccine | 10 | ug | 50 | uL | day 0, 28, 42 | IM |
| | | chAd68 vaccine | 1e11 | vp | 2x 50 | uL | day 14 | IM |
| | | Anti-PD1 | 250 | ug | 100 | uL | 2x/week (start day 0) | IP |
| 6 | 28 | srRNA vaccine | 10 | ug | 50 | uL | day 0, 28, 42 | IM |
| | | chAd68 vaccine | 1e11 | vp | 2x 50 | uL | day 14 | IM |
| | | Anti-IgG | 250 | ug | 100 | uL | 2x/week (start day 0) | IP |
| 7 | 40 | srRNA vaccine | 10 | ug | 50 | uL | day 0, 14, 28, 42 | IM |
| | | Anti-PD1 | 250 | ug | 100 | uL | 2x/week (start day 0) | IP |
| 8 | 40 | srRNA vaccine | 10 | ug | 50 | uL | day 0, 14, 28, 42 | IM |
| | | Anti-IgG | 250 | ug | 100 | uL | 2x/week (start day 0) | IP |

### Immunizations

[0540] For srRNA vaccine, mice were injected with 10 ug of VEE-MAG25mer srRNA in 100 uL volume, bilateral intramuscular injection (50 uL per leg). For C68 vaccine, mice were injected with 1×10¹¹ viral particles (VP) of ChAdV68.5WTnt.MAG25mer in 100 uL volume, bilateral intramuscular injection (50 uL per leg). Animals were injected with anti-PD-1 (clone RP1-14, BioXcell) or anti-IgG (clone MPC-11, BioXcell), 250 ug dose, 2 times per week, via intraperitoneal injection.

### Splenocyte Dissociation

[0541] Spleen and lymph nodes for each mouse were pooled in 3 mL of complete RPMI (RPMI, 10% FBS, penicillin/streptomycin). Mechanical dissociation was performed using the gentleMACS Dissociator (Miltenyi Biotec), following manufacturer's protocol. Dissociated cells were filtered through a 40 micron filter and red blood cells were lysed with ACK lysis buffer (150 mM NH₄Cl, 10 mM KHCO₃, 0.1 mM Na₂EDTA). Cells were filtered again through a 30 micron filter and then resuspended in complete RPMI. Cells were counted on the Attune NxT flow cytometer (Thermo Fisher) using propidium iodide staining to exclude dead and apoptotic cells. Cell were then adjusted to the appropriate concentration of live cells for subsequent analysis.

### Ex Vivo Enzyme-Linked Immunospot (ELISPOT) Analysis

[0542] ELISPOT analysis was performed according to ELISPOT harmonization guidelines {DOI: 10.1038/nprot.2015.068} with the mouse IFNg ELISpotPLUS kit (MABTECH). 5×10⁴ splenocytes were incubated with 10 uM of the indicated peptides for 16 hours in 96-well IFNg antibody coated plates. Spots were developed using alkaline phosphatase. The reaction was timed for 10 minutes and was terminated by running plate under tap water. Spots were counted using an AID vSpot Reader Spectrum. For ELISPOT analysis, wells with saturation >50% were recorded as “too numerous to count”. Samples with deviation of replicate wells >10% were excluded from analysis. Spot counts were then corrected for well confluency using the formula: spot count+2×(spot count×% confluence/[100%−% confluence]). Negative background was corrected by subtraction of spot counts in the negative peptide stimulation wells from the antigen stimulated wells. Finally, wells labeled too numerous to count were set to the highest observed corrected value, rounded up to the nearest hundred.

[0543] XVII.B ChAdV/srRNA Combination Evaluation in a CT26 Tumor Model

[0544] The immunogenicity and efficacy of the ChAdV68.5WTnt.MAG25mer/VEE-MAG25mer srRNA heterologous prime/boost or VEE-MAG25mer srRNA homologous prime/boost vaccines were evaluated in the CT26 mouse tumor model. Balb/c mice were injected with the CT26 tumor cell line. 7 days after tumor cell injection, mice were randomized to the different study arms and treatment initiated. The study arms are described in detail in Table 15 and more generally in Table 16.

TABLE 16
Prime/Boost Study Arms

| Group | Prime | Boost |
|---|---|---|
| 1 | Control | Control |
| 2 | Control + anti-PD-1 | Control + anti-PD-1 |
| 3 | ChAdV68.5WTnt.MAG25mer | VEE-MAG25mer srRNA |
| 4 | ChAdV68.5WTnt.MAG25mer + anti-PD-1 | VEE-MAG25mer srRNA + anti-PD-1 |
| 5 | VEE-MAG25mer srRNA | ChAdV68.5WTnt.MAG25mer |
| 6 | VEE-MAG25mer srRNA + anti-PD-1 | ChAdV68.5WTnt.MAG25mer + anti-PD-1 |
| 7 | VEE-MAG25mer srRNA | VEE-MAG25mer srRNA |
| 8 | VEE-MAG25mer srRNA + anti-PD-1 | VEE-MAG25mer srRNA + anti-PD-1 |

[0545] Spleens were harvested 14 days after the prime vaccination for immune monitoring. Tumor and body weight measurements were taken twice a week and survival was monitored. Strong immune responses relative to control were observed in all active vaccine groups.

[0546] Median cellular immune responses of 10,630, 12,976, 3319, or 3745 spot forming cells (SFCs) per 10⁶ splenocytes were observed in ELISpot assays in mice immunized with ChAdV68.5WTnt.MAG25mer (ChAdV/group 3), ChAdV68.5WTnt.MAG25mer+ anti-PD-1 (ChAdV+PD-1/group 4), VEE-MAG25mer srRNA (srRNA/median for groups 5 & 7 combined), or VEE-MAG25mer srRNA+ anti-PD-1 (srRNA+PD-1/median for groups 6 & 8 combined), respectively, 14 days after the first immunization (FIG. 16 and Table 17). In contrast, the vaccine control (group 1) or vaccine control with anti-PD-1 (group 2) exhibited median cellular immune responses of 296 or 285 SFC per 10⁶ splenocytes, respectively.

TABLE 17
Cellular immune responses in a CT26 tumor model

| Treatment | Median SFC/10⁶ Splenocytes |
|---|---|
| Control | 296 |
| PD1 | 285 |
| ChAdV68.5WTnt.MAG25mer | 10630 |
| (ChAdV) | |
| ChAdV68.5WTnt.MAG25mer + | 12976 |
| PD1 (ChAdV + PD-1) | |
| VEE-MAG25mer srRNA | 3319 |
| (srRNA) | |
| VEE-MAG25mer srRNA + | 3745 |
| PD-1 (srRNA + PD1) | |

[0547] Consistent with the ELISpot data, 5.6, 7.8, 1.8 or 1.9% of CD8 T cells (median) exhibited antigen-specific responses in intracellular cytokine staining (ICS) analyses for mice immunized with ChAdV68.5WTnt.MAG25mer (ChAdV/group 3), ChAdV68.5WTnt.MAG25mer+ anti-PD-1 (ChAdV+PD-1/group 4), VEE-MAG25mer srRNA (srRNA/median for groups 5 & 7 combined), or VEE-MAG25mer srRNA+ anti-PD-1 (srRNA+PD-1/median for groups 6 & 8 combined), respectively, 14 days after the first immunization (FIG. 17 and Table 18). Mice immunized with the vaccine control or vaccine control combined with anti-PD-1 showed antigen-specific CD8 responses of 0.2 and 0.1%, respectively.

TABLE 18
CD8 T-Cell responses in a CT26 tumor model

| | Median % CD8 IFN- |
|---|---|
| Treatment | gamma Positive |
| Control | 0.21 |
| PD1 | 0.1 |
| ChAdV68.5WTnt.MAG25mer | 5.6 |
| (ChAdV) | |
| ChAdV68.5WTnt.MAG25mer + | 7.8 |
| PD1 (ChAdV + PD-1) | |
| VEE-MAG25mer srRNA | 1.8 |
| (srRNA) | |
| VEE-MAG25mer srRNA + | 1.9 |
| PD-1 (srRNA + PD1) | |

[0548] Tumor growth was measured in the CT26 colon tumor model for all groups, and tumor growth up to 21 days after treatment initiation (28 days after injection of CT-26 tumor cells) is presented. Mice were sacrificed 21 days after treatment initiation based on large tumor sizes (>2500 mm³); therefore, only the first 21 days are presented to avoid analytical bias. Mean tumor volumes at 21 days were 1129, 848, 2142, 1418, 2198 and 1606 mm³ for ChAdV68.5WTnt.MAG25mer prime/VEE-MAG25mer srRNA boost (group 3), ChAdV68.5WTnt.MAG25mer prime/VEE-MAG25mer srRNA boost+ anti-PD-1 (group 4), VEE-MAG25mer srRNA prime/ChAdV68.5WTnt.MAG25mer boost (group 5), VEE-MAG25mer srRNA prime/ChAdV68.5WTnt.MAG25mer boost+ anti-PD-1 (group 6), VEE-MAG25mer srRNA prime/VEE-MAG25mer srRNA boost (group 7) and VEE-MAG25mer srRNA prime/VEE-MAG25mer srRNA boost+ anti-PD-1 (group 8), respectively (FIG. 18 and Table 19). The mean tumor volumes in the vaccine control or vaccine control combined with anti-PD-1 were 2361 or 2067 mm³, respectively. Based on these data, vaccine treatment with ChAdV68.5WTnt.MAG25mer/VEE-MAG25mer srRNA (group 3), ChAdV68.5WTnt.MAG25mer/VEE-MAG25mer srRNA+ anti-PD-1 (group 4), VEE-MAG25mer srRNA/ChAdV68.5WTnt.MAG25mer+ anti-PD-1 (group 6) and VEE-MAG25mer srRNA/VEE-MAG25mer srRNA+ anti-PD-1 (group 8) resulted in a reduction of tumor growth at 21 days that was significantly different from the control (group 1).

TABLE 19
Tumor size at day 21 measured in the CT26 model

| Treatment | Tumor Size (mm³) | SEM |
|---|---|---|
| Control | 2361 | 235 |
| PD1 | 2067 | 137 |
| chAdV/srRNA | 1129 | 181 |
| chAdV/srRNA + PD1 | 848 | 182 |
| srRNA/chAdV | 2142 | 233 |
| srRNA/chAdV + PD1 | 1418 | 220 |
| srRNA | 2198 | 134 |
| srRNA + PD1 | 1606 | 210 |

[0549] Survival was monitored for 35 days after treatment initiation in the CT-26 tumor model (42 days after injection of CT-26 tumor cells). Improved survival was observed after vaccination of mice with 4 of the combinations tested. After vaccination, 64%, 46%, 41% and 36% of mice survived with ChAdV68.5WTnt.MAG25mer prime/VEE-MAG25mer srRNA boost in combination with anti-PD-1 (group 4; P<0.0001 relative to control group 1), VEE-MAG25mer srRNA prime/VEE-MAG25mer srRNA boost in combination with anti-PD-1 (group 8; P=0.0006 relative to control group 1), ChAdV68.5WTnt.MAG25mer prime/VEE-MAG25mer srRNA boost (group 3; P=0.0003 relative to control group 1) and VEE-MAG25mer srRNA prime/ChAdV68.5WTnt.MAG25mer boost in combination with anti-PD-1 (group 6; P=0.0016 relative to control group 1), respectively (FIG. 19 and Table 20). Survival was not significantly different from the control group 1 (<14%) for the remaining treatment groups [VEE-MAG25mer srRNAprime/ChAdV68.5WTnt.MAG25mer boost (group 5), VEE-MAG25mer srRNA prime/VEE-MAG25mer srRNA boost (group 7) and anti-PD-1 alone (group 2)].

TABLE 20
Survival in the CT26 model

| | | | | chAdV/ | | srRNA/ | | |
|---|---|---|---|---|---|---|---|---|
| | | | chAdV/ | srRNA + | srRNA/ | chAdV + | | srRNA + |
| Timepoint | Control | PD1 | srRNA | PD1 | chAdV | PD1 | srRNA | PD1 |
| 0 | 100 | 100 | 100 | 100.00 | 100.00 | 100 | 100 | 100 |
| 21 | 96 | 100 | 100 | 100 | 100 | 95 | 100 | 100 |
| 24 | 54 | 64 | 91 | 100 | 68 | 82 | 68 | 71 |
| 28 | 21 | 32 | 68 | 86 | 45 | 68 | 21 | 64 |
| 31 | 7 | 14 | 41 | 64 | 14 | 36 | 11 | 46 |
| 35 | 7 | 14 | 41 | 64 | 14 | 36 | 11 | 46 |

[0550] In conclusion, ChAdV68.5WTnt.MAG25mer and VEE-MAG25mer srRNA elicited strong T-cell responses to mouse tumor antigens encoded by the vaccines, relative to control. Administration of a ChAdV68.5WTnt.MAG25mer prime and VEE-MAG25mer srRNA boost with or without co-administration of anti-PD-1, VEE-MAG25mer srRNA prime and ChAdV68.5WTnt.MAG25mer boost in combination with anti-PD-1 or administration of VEE-MAG25mer srRNA as a homologous prime boost immunization in combination with anti-PD-1 to tumor bearing mice resulted in improved survival.

### XVIII. Non-Human Primate Studies

[0551] Various dosing protocols using ChAdV68 and self-replicating RNA (srRNA) were evaluated in non-human primates (NHP).

[0552] Materials and Methods

[0553] A priming vaccine was injected intramuscularly (IM) in each NHP to initiate the study (vaccine prime). One or more boosting vaccines (vaccine boost) were also injected intramuscularly in each NP. Bilateral injections per dose were administered according to groups outlined in tables and summarized below.

### Immunizations

[0554] Mamu-A*01 Indian rhesus macaques were immunized bilaterally with 1×10¹² viral particles (5×10¹¹ viral particles per injection) of ChAdV68.5WTnt.MAG25mer, 30 ug of VEE-MAG25MER srRNA, 100 ug of VEE-MAG25mer srRNA or 300 ug of VEE-MAG25mer srRNA formulated in LNP-1 or LNP-2. Vaccine boosts of 30 ug, 100 ug or 300 ug VEE-MAG25mer srRNA were administered intramuscularly at the indicated time after prime vaccination.

### Immune Monitoring

[0555] PBMCs were isolated at indicated times after prime vaccination using Lymphocyte Separation Medium (LSM, MP Biomedicals) and LeucoSep separation tubes (Greiner Bio-One) and resuspended in RPMI containing 10% FBS and penicillin/streptomycin. Cells were counted on the Attune NxT flow cytometer (Thermo Fisher) using propidium iodide staining to exclude dead and apoptotic cells. Cell were then adjusted to the appropriate concentration of live cells for subsequent analysis. For each monkey in the studies, T cell responses were measured using ELISpot or flow cytometry methods. T cell responses to 6 different rhesus macaque Mamu-A*01 class I epitopes encoded in the vaccines were monitored from PBMCs by measuring induction of cytokines, such as IFN-gamma, using ex vivo enzyme-linked immunospot (ELISpot) analysis. ELISpot analysis was performed according to ELISPOT harmonization guidelines {DOI. 10.1038/nprot.2015.068} with the monkey IFNg ELISpotPLUS kit (MABTECH). 200,000 PBMCs were incubated with 10 uM of the indicated peptides for 16 hours in 96-well IFNg antibody coated plates. Spots were developed using alkaline phosphatase. The reaction was timed for 10 minutes and was terminated by running plate under tap water. Spots were counted using an AID vSpot Reader Spectrum. For ELISPOT analysis, wells with saturation >50% were recorded as “too numerous to count”. Samples with deviation of replicate wells >10% were excluded from analysis. Spot counts were then corrected for well confluency using the formula: spot count+2×(spot count×% confluence/[100%−% confluence]). Negative background was corrected by subtraction of spot counts in the negative peptide stimulation wells from the antigen stimulated wells. Finally, wells labeled too numerous to count were set to the highest observed corrected value, rounded up to the nearest hundred.

[0556] Specific CD4 and CD8 T cell responses to 6 different rhesus macaque Mamu-A*01 class I epitopes encoded in the vaccines were monitored from PBMCs by measuring induction of intracellular cytokines, such as IFN-gamma, using flow cytometry. The results from both methods indicate that cytokines were induced in an antigen-specific manner to epitopes.

[0557] Immunogenicity in Rhesus Macaques

[0558] This study was designed to (a) evaluate the immunogenicity and preliminary safety of VEE-MAG25mer srRNA 30 μg and 100 μg doses as a homologous prime/boost or heterologous prime/boost in combination with ChAdV68.5WTnt.MAG25mer; (b) compare the immune responses of VEE-MAG25mer srRNA in lipid nanoparticles using LNP1 versus LNP2; (c) evaluate the kinetics of T-cell responses to VEE-MAG25mer srRNA and ChAdV68.5WTnt.MAG25mer immunizations.

[0559] The study arm was conducted in Mamu-A*01 Indian rhesus macaques to demonstrate immunogenicity. Select antigens used in this study are only recognized in Rhesus macaques, specifically those with a Mamu-A*01 MHC class I haplotype. Mamu-A*01 Indian rhesus macaques were randomized to the different study arms (6 macaques per group) and administered an IM injection bilaterally with either ChAdV68.5WTnt.MAG25mer or VEE-MAG25mer srRNA vector encoding model antigens that includes multiple Mamu-A*01 restricted epitopes. The study arms were as described below.

TABLE 21
Non-GLP immunogenicity study in Indian Rhesus Macaques

| Group | Prime | Boost 1 | Boost 2 |
|---|---|---|---|
| 1 | VEE-MAG25mer | VEE-MAG25mer | VEE-MAG25mer |
| | srRNA-LNP1 | srRNA-LNP1 | srRNA-LNP1 |
| | (30 μg) | (30 μg) | (30 μg) |
| 2 | VEE-MAG25mer | VEE-MAG25mer | VEE-MAG25mer |
| | srRNA-LNP1 | srRNA-LNP1 | srRNA-LNP1 |
| | (100 μg) | (100 μg) | (100 μg) |
| 3 | VEE-MAG25mer | VEE-MAG25mer | VEE-MAG25mer |
| | srRNA-LNP2 | srRNA-LNP2 | srRNA-LNP2 |
| | (100 μg) | (100 μg) | (100 μg) |
| 4 | ChAdV68.5WTnt.MAG25mer | VEE-MAG25mer | VEE-MAG25mer |
| | | srRNA-LNP1 | srRNA-LNP1 |
| | | (100 μg) | (100 μg) |

[0560] PBMCs were collected prior to immunization and on weeks 1, 2, 3, 4, 5, 6, 8, 9, and 10 after the initial immunization for immune monitoring.

[0561] Results

[0562] Antigen-specific cellular immune responses in peripheral blood mononuclear cells (PBMCs) were measured to six different Mamu-A*01 restricted epitopes prior to immunization and 1, 2, 3, 4, 5, 6, 8, 9, and 10 weeks after the initial immunization. Animals received a boost immunization with VEE-MAG25mer srRNA on weeks 4 and 8 with either 30 μg or 100 μg doses, and either formulated with LNP1 or LNP2, as described in Table 21. Combined immune responses to all six epitopes were plotted for each immune monitoring timepoint (FIG. 20A-D and Tables 22-25).

[0563] Combined antigen-specific immune responses were observed at all measurements with 170, 14, 15, 11, 7, 8, 14, 17, 12 SFCs per 10⁶ PBMCs (six epitopes combined) 1, 2, 3, 4, 5, 6, 8, 9, or 10 weeks after an initial VEE-MAG25mer srRNA-LNP1 (30 μg) prime immunization, respectively (FIG. 20A). Combined antigen-specific immune responses were observed at all measurements with 108, −3, 14, 1, 37, 4, 105, 17, 25 SFCs per 10⁶ PBMCs (six epitopes combined) 1, 2, 3, 4, 5, 6, 8, 9, or 10 weeks after an initial VEE-MAG25mer srRNA-LNP1 (100 μg) prime immunization, respectively (FIG. 20B). Combined antigen-specific immune responses were observed at all measurements with −17, 38, 14, −2, 87, 21, 104, 129, 89 SFCs per 10⁶ PBMCs (six epitopes combined) 1, 2, 3, 4, 5, 6, 8, 9, or 10 weeks after an initial VEE-MAG25mer srRNA-LNP2 (100 μg) prime immunization, respectively (FIG. 20C). Negative values are a result of normalization to pre-bleed values for each epitope/animal.

[0564] Combined antigen-specific immune responses were observed at all measurements with 1218, 1784, 1866, 973, 1813, 747, 797, 1249, and 547 SFCs per 10⁶ PBMCs (six epitopes combined) 1, 2, 3, 4, 5, 6, 8, 9, or 10 weeks after an initial ChAdV68.5WTnt.MAG25mer prime immunization, respectively (FIG. 20D). The immune response showed the expected profile with peak immune responses measured ˜2-3 weeks after the prime immunization followed by a contraction in the immune response after 4 weeks. Combined antigen-specific cellular immune responses of 1813 SFCs per 10⁶ PBMCs (six epitopes combined) were measured 5 weeks after the initial immunization with ChAdV68.5WTnt.MAG25mer (i.e., 1 week after the first boost with VEE-MAG25mer srRNA). The immune response measured 1 week after the first boost with VEE-MAG25mer srRNA (week 5) was comparable to the peak immune response measured for the ChAdV68.5WTnt.MAG25mer prime immunization (week 3) (FIG. 20D). Combined antigen-specific cellular immune responses of 1249 SFCs per 10⁶ PBMCs (six epitopes combined) was measured 9 weeks after the initial immunization with ChAdV68.5WTnt.MAG25mer, respectivley (i.e., 1 week after the second boost with VEE-MAG25mer srRNA). The immune responses measured 1 week after the second boost with VEE-MAG25mer srRNA (week 9) was ˜2-fold higher than that measured just before the boost immunization (FIG. 20D).

TABLE 22
Mean spot forming cells (SFC) per 10⁶ PBMCs for each epitope ±
SEM for VEE-MAG25mer srRNA-LNP1(30 μg) (Group 1)

| | Antigen | | | | | |
|---|---|---|---|---|---|---|
| Wk | Env CL9 | Env TL9 | Gag CM9 | Gag LW9 | Pol SV9 | Tat TL8 |
| 1 | 0 ± 0 | 0 ± 0 | 0 ± 0 | 0 ± 0 | 0 ± 0 | 0 ± 0 |
| 2 | 39.7 ± 22.7 | 35.4 ± 25.1 | 3.2 ± 3.6 | 33 ± 28.1 | 30.9 ± 20.3 | 28.3 ± 17.5 |
| 3 | 2 ± 2.4 | 0.2 ± 1.8 | 1.8 ± 2.4 | 3.7 ± 1.9 | 1.7 ± 2.8 | 4.9 ± 2.3 |
| 4 | 1 ± 1.8 | 0.3 ± 1.2 | 5.5 ± 3.6 | 2.3 ± 2.2 | 5.7 ± 2.7 | 0.8 ± 0.8 |
| 5 | 0.5 ± 0.9 | 1.4 ± 3.8 | 3.1 ± 1.6 | 2.3 ± 2.7 | 1.9 ± 2 | 1.4 ± 1.2 |
| 6 | 1.9 ± 1.8 | −0.3 ± 3 | 1.7 ± 1.2 | 1.4 ± 1.4 | 0.8 ± 1.1 | 1.1 ± 1 |
| 8 | −0.4 ± 0.8 | −0.9 ± 2.9 | 0.5 ± 1.3 | 3 ± 1.1 | 2.2 ± 2.1 | 3.7 ± 2 |
| 9 | 1 ± 1.7 | 1.2 ± 4.2 | 7.2 ± 3.9 | 0.5 ± 0.7 | 1.6 ± 3 | 3 ± 1 |
| 10 | 3.8 ± 1.8 | 11 ± 5 | −1.1 ± 1.1 | 1.9 ± 0.9 | 1.3 ± 1.6 | 0.2 ± 0.5 |

TABLE 23
Mean spot forming cells (SFC) per 10⁶ PBMCs for each epitope ±
SEM for VEE-MAG25mer srRNA-LNP1(100 μg) (Group 2)

| | Antigen | | | | | |
|---|---|---|---|---|---|---|
| Wk | Env CL9 | Env TL9 | Gag CM9 | Gag LW9 | Pol SV9 | Tat TL8 |
| 1 | 0 ± 0 | 0 ± 0 | 0 ± 0 | 0 ± 0 | 0 ± 0 | 0 ± 0 |
| 2 | 7.9 ± 17.2 | 23.2 ± 17.4 | 11.4 ± 4.9 | 41.7 ± 16.5 | 15 ± 13.5 | 8.9 ± 6.2 |
| 3 | −3.1 ± 4.6 | −7.2 ± 6.5 | 2.3 ± 2.3 | −0.3 ± 2.7 | 2.7 ± 5.1 | 2.2 ± 1.4 |
| 4 | 1.9 ± 3.8 | −6.2 ± 7.6 | 10.5 ± 4.1 | 1.2 ± 2.9 | 5.6 ± 4.9 | 1.1 ± 0.8 |
| 5 | −2.6 ± 7 | −8 ± 5.9 | 1.5 ± 1.7 | 6.4 ± 2.3 | 0.7 ± 4.3 | 3.3 ± 1.3 |
| 6 | 6.3 ± 6.3 | 4.4 ± 8.3 | 6.6 ± 4.4 | 5.2 ± 5.2 | 3.9 ± 5 | 10.8 ± 6.9 |
| 8 | −3.6 ± 7.2 | −6.8 ± 7.3 | −0.8 ± 1.2 | 3.4 ± 4.2 | 6.4 ± 7.5 | 5.7 ± 2.7 |
| 9 | 8.1 ± 2.4 | 20.6 ± 23.4 | 18.9 ± 5.7 | 8.1 ± 8.9 | 9 ± 11.2 | 40 ± 17.6 |
| 10 | 3.1 ± 8 | −3.9 ± 8.5 | 3.3 ± 1.8 | 0.6 ± 2.9 | 7.4 ± 6.4 | 6.1 ± 2.5 |

TABLE 24
Mean spot forming cells (SFC) per 10⁶ PBMCs for each epitope ±
SEM for VEE-MAG25mer srRNA-LNP2(100 μg) (Group 3)

| | Antigen | | | | | |
|---|---|---|---|---|---|---|
| Wk | Env CL9 | Env TL9 | Gag CM9 | Gag LW9 | Pol SV9 | Tat TL8 |
| 1 | 0 ± 0 | 0 ± 0 | 0 ± 0 | 0 ± 0 | 0 ± 0 | 0 ± 0 |
| 2 | −5.9 ± 3.8 | −0.3 ± 0.5 | −0.5 ± 1.5 | −5.7 ± 6.1 | −1 ± 1.3 | −3.2 ± 5.5 |
| 3 | 0.7 ± 5.2 | 3.4 ± 2.4 | 4.2 ± 4.6 | 18.3 ± 15.5 | 11.9 ± 5.1 | −0.4 ± 8.2 |
| 4 | −3.8 ± 5.5 | 2.3 ± 1.8 | 11.3 ± 6.1 | −3.1 ± 5.6 | 8.5 ± 4 | −1.5 ± 6.1 |
| 5 | −3.7 ± 5.7 | −0.1 ± 0.7 | −0.2 ± 1.6 | 3.4 ± 8.5 | 3 ± 3.1 | −4.6 ± 5 |
| 6 | 12.3 ± 15 | 7.8 ± 4.9 | 24.7 ± 19.8 | 23.2 ± 22.5 | 18.7 ± 15.8 | 0.5 ± 6.2 |
| 8 | 5.9 ± 12.3 | −0.1 ± 0.7 | −0.5 ± 1.3 | 8.8 ± 14.4 | 8.7 ± 8 | −1.3 ± 4 |
| 9 | 16.1 ± 13.4 | 16.5 ± 4 | 22.9 ± 4.2 | 13 ± 13.2 | 16.4 ± 7.8 | 19.6 ± 9.2 |
| 10 | 29.9 ± 21.8 | 22 ± 19.5 | 0.5 ± 2.6 | 22.2 ± 22.6 | 35.3 ± 15.8 | 19.4 ± 17.3 |

TABLE 25
Mean spot forming cells (SFC) per 10⁶ PBMCs for each
epitope ± SEM for ChAdV68.5WTnt.MAG25mer prime

| | Antigen | | | | | |
|---|---|---|---|---|---|---|
| Wk | Env CL9 | Env TL9 | Gag CM9 | Gag LW9 | Pol SV9 | Tat TL8 |
| 1 | 178 ± 68.7 | 206.5 ± 94.8 | 221.2 ± 120 | 15.4 ± 16.7 | 33.3 ± 25.9 | 563.5 ± 174.4 |
| 2 | 311.2 ± 165.5 | 278.8 ± 100.9 | 344.6 ± 110.8 | 46.3 ± 13.5 | 181.6 ± 76.8 | 621.4 ± 220.9 |
| 3 | 277.3 ± 101.1 | 359.6 ± 90.5 | 468.2 ± 106.6 | 41.7 ± 11.1 | 169.8 ± 57.8 | 549.4 ± 115.7 |
| 4 | 140 ± 46.5 | 169.6 ± 46.8 | 239.4 ± 37 | 26.5 ± 11.4 | 75 ± 31.6 | 322.2 ± 50.7 |
| 5 | 155.6 ± 62.1 | 406.7 ± 96.4 | 542.7 ± 143.3 | 35.1 ± 16.6 | 134.2 ± 53.7 | 538.5 ± 91.9 |
| 6 | 78.9 ± 42.5 | 95.5 ± 29.4 | 220.9 ± 75.3 | −1.4 ± 5.3 | 43.4 ± 19.6 | 308.1 ± 42.6 |
| 8 | 88.4 ± 30.4 | 162.1 ± 30.3 | 253.4 ± 78.6 | 21.4 ± 11.2 | 53.7 ± 22.3 | 217.8 ± 45.2 |
| 9 | 158.5 ± 69 | 322.3 ± 87.2 | 338.2 ± 137.1 | 5.6 ± 12.4 | 109.2 ± 17.9 | 314.8 ± 43.4 |
| 10 | 97.3 ± 32.5 | 133.2 ± 27 | 154.9 ± 59.2 | 10 ± 6 | 26 ± 16.7 | 125.5 ± 27.7 |

### Non-GLP RNA Dose Ranging Study (Higher Doses) in Indian Rhesus Macaques

[0565] This study was designed to (a) evaluate the immunogenicity of VEE-MAG25mer srRNA at a dose of 300 μg as a homologous prime/boost or heterologous prime/boost in combination with ChAdV68.5WTnt.MAG25mer; (b) compare the immune responses of VEE-MAG25mer srRNA in lipid nanoparticles using LNP1 versus LNP2 at the 300 μg dose; and (c) evaluate the kinetics of T-cell responses to VEE-MAG25mer srRNA and ChAdV68.5WTnt.MAG25mer immunizations.

[0566] The study arm was conducted in Mamu-A*01 Indian rhesus macaques to demonstrate immunogenicity. Vaccine immunogenicity in nonhuman primate species, such as Rhesus, is the best predictor of vaccine potency in humans. Furthermore, select antigens used in this study are only recognized in Rhesus macaques, specifically those with a Mamu-A*01 MHC class I haplotype. Mamu-A*01 Indian rhesus macaques were randomized to the different study arms (6 macaques per group) and administered an IM injection bilaterally with either ChAdV68.5-WTnt.MAG25mer or VEE-MAG25mer srRNA encoding model antigens that includes multiple Mamu-A*01 restricted antigens. The study arms were as described below.

[0567] PBMCs were collected prior to immunization and 4, 5, 6, 7, 8, 10, 11, 12, 13, 14, 15, 16, 17, 18, 19, 20, 21, 22, 23 or 24 weeks after the initial immunization for immune monitoring for group 1 (heterologous prime/boost). PBMCs were collected prior to immunization and 4, 5, 7, 8, 10, 11, 12, 13, 14, or 15 weeks after the initial immunization for immune monitoring for groups 2 and 3 (homologous prime/boost).

TABLE 26
Non-GLP immunogenicity study in Indian Rhesus Macaques

| Group | Prime | Boost 1 | Boost 2 | Boost 3 |
|---|---|---|---|---|
| 1 | ChAdV68.5WTnt.MAG25mer | VEE-MAG25mer | VEE-MAG25mer | VEE-MAG25mer |
| | | srRNA-LNP2 | srRNA-LNP2 | srRNA-LNP2 |
| | | (300 μg) | (300 μg) | (300 μg) |
| 2 | VEE-MAG25mer | VEE-MAG25mer | VEE-MAG25mer | |
| | srRNA-LNP2 | srRNA-LNP2 | srRNA-LNP2 | |
| | (300 μg) | (300 μg) | (300 μg) | |
| 3 | VEE-MAG25mer | VEE-MAG25mer | VEE-MAG25mer | |
| | srRNA-LNP1 | srRNA-LNP1 | srRNA-LNP1 | |
| | (300 μg) | (300 μg) | (300 μg) | |

[0568] Results

[0569] Mamu-A*01 Indian rhesus macaques were immunized with ChAdV68.5-WTnt.MAG25mer. Antigen-specific cellular immune responses in peripheral blood mononuclear cells (PBMCs) were measured to six different Mamu-A*01 restricted epitopes prior to immunization and 4, 5, 6, 7, 8, 10, 11, 12, 13, 14, 15, 16, 17, 18, 19, 20, 21, 22, 23 or 24 weeks after the initial immunization (FIG. 21 and Table 27). Animals received boost immunizations with VEE-MAG25mer srRNA using the LNP2 formulation on weeks 4, 12, and 20. Combined antigen-specific immune responses of 1750, 4225, 1100, 2529, 3218, 1915, 1708, 1561, 5077, 4543, 4920, 5820, 3395, 2728, 1996, 1465, 4730, 2984, 2828, or 3043 SFCs per 10⁶ PBMCs (six epitopes combined) were measured 4, 5, 6, 7, 8, 10, 11, 12, 13, 14, 15, 16, 17, 18, 19, 20, 21, 22, 23 or 24 weeks after the initial immunization with ChAdV68.5WTnt.MAG25mer (FIG. 21). Immune responses measured 1 week after the second boost immunization (week 13) with VEE-MAG25mer srRNA were ˜3-fold higher than that measured just before the boost immunization (week 12). Immune responses measured 1 week after the third boost immunization (week 21) with VEE-MAG25mer srRNA, were ˜3-fold higher than that measured just before the boost immunization (week 20), similar to the response observed for the second boost.

[0570] Mamu-A*01 Indian rhesus macaques were also immunized with VEE-MAG25mer srRNA using two different LNP formulations (LNP1 and LNP2). Antigen-specific cellular immune responses in peripheral blood mononuclear cells (PBMCs) were measured to six different Mamu-A*01 restricted epitopes prior to immunization and 4, 5, 6, 7, 8, 10, 11, 12, 13, 14, or 15 weeks after the initial immunization (FIGS. 22 and 23, Tables 28 and 29). Animals received boost immunizations with VEE-MAG25mer srRNA using the respective LNP1 or LNP2 formulation on weeks 4 and 12. Combined antigen-specific immune responses of 168, 204, 103, 126, 140, 145, 330, 203, and 162 SFCs per 106 PBMCs (six epitopes combined) were measured 4, 5, 7, 8, 10, 11, 13, 14, 15 weeks after the immunization with VEE-MAG25mer srRNA-LNP2 (FIG. 22). Combined antigen-specific immune responses of 189, 185, 349, 437, 492, 570, 233, 886, 369, and 381 SFCs per 10⁶ PBMCs (six epitopes combined) were measured 4, 5, 7, 8, 10, 11, 12, 13, 14, 15 weeks after the immunization with VEE-MAG25mer srRNA-LNP1 (FIG. 23).

TABLE 27
Mean spot forming cells (SFC) per 10⁶ PBMCs for each epitope ±
SEM for priming vaccination with ChAdV68.5WTnt.MAG25mer (Group 1)

| | Antigen | | | | | |
|---|---|---|---|---|---|---|
| Wk | Env CL9 | Env TL9 | Gag CM9 | Gag LW9 | Pol SV9 | Tat TL8 |
| 4 | 173 ± 41.6 | 373.5 ± 87.3 | 461.4 ± 74.2 | 38.4 ± 26.1 | 94.5 ± 26 | 609.2 ± 121.9 |
| 5 | 412.7 ± 138.4 | 987.8 ± 283.3 | 1064.4 ± 266.9 | 85.6 ± 31.2 | 367.2 ± 135.2 | 1306.8 ± 332.8 |
| 6 | 116.2 ± 41.2 | 231.1 ± 46.3 | 268.3 ± 90.7 | 86.1 ± 42 | 174.3 ± 61 | 223.9 ± 38.1 |
| 7 | 287.4 ± 148.7 | 588.9 ± 173.9 | 693.2 ± 224.8 | 92.1 ± 33.5 | 172.9 ± 55.6 | 694.6 ± 194.8 |
| 8 | 325.4 ± 126.6 | 735.8 ± 212 | 948.9 ± 274.5 | 211.3 ± 62.7 | 179.1 ± 50 | 817.3 ± 185.2 |
| 10 | 312 ± 129.7 | 543.2 ± 188.4 | 618.6 ± 221.7 | −5.7 ± 4.1 | 136.5 ± 51.3 | 309.9 ± 85.6 |
| 11 | 248.5 ± 81.1 | 348.7 ± 129.8 | 581.1 ± 205.5 | −3.1 ± 4.4 | 119 ± 51.2 | 413.7 ± 144.8 |
| 12 | 261.9 ± 68.2 | 329.9 ± 83 | 486.5 ± 118.6 | −1.2 ± 5.1 | 132.8 ± 31.8 | 350.9 ± 69.3 |
| 13 | 389.3 ± 167.7 | 1615.8 ± 418.3 | 1244.3 ± 403.6 | 1.3 ± 8.1 | 522.5 ± 155 | 1303.3 ± 385.6 |
| 14 | 406.3 ± 121.6 | 1616 ± 491.7 | 1142.3 ± 247.2 | 6.6 ± 11.1 | 322.7 ± 94.1 | 1048.6 ± 215.6 |
| 15 | 446.8 ± 138.7 | 1700.8 ± 469.1 | 1306.3 ± 294.4 | 43 ± 24.5 | 421.2 ± 87.9 | 1001.5 ± 236.4 |
| 16 | 686.8 ± 268.8 | 1979.5 ± 541.7 | 1616.8 ± 411.8 | 2.4 ± 7.8 | 381.9 ± 116.4 | 1152.8 ± 352.7 |
| 17 | 375.8 ± 109.3 | 1378.6 ± 561.2 | 773.1 ± 210.3 | −1.4 ± 4.3 | 177.6 ± 93.7 | 691.7 ± 245 |
| 18 | 255.9 ± 99.7 | 1538.4 ± 498.1 | 498.7 ± 152.3 | −5.3 ± 3.3 | 26.2 ± 13.4 | 413.9 ± 164.8 |
| 19 | 133 ± 62.6 | 955.9 ± 456.8 | 491.1 ± 121.8 | −5.7 ± 4.1 | 50.3 ± 25.4 | 371.2 ± 123.7 |
| 20 | 163.7 ± 55.8 | 641.7 ± 313.5 | 357.9 ± 91.1 | 2.6 ± 7.5 | 41.4 ± 24.2 | 257.8 ± 68.9 |
| 21 | 319.9 ± 160.5 | 2017.1 ± 419.9 | 1204.8 ± 335.2 | −3.7 ± 5.1 | 268.1 ± 109.6 | 924.1 ± 301 |
| 22 | 244.7 ± 105.6 | 1370.9 ± 563.5 | 780.3 ± 390 | −3.6 ± 5.1 | 118.2 ± 68.1 | 473.3 ± 249.3 |
| 23 | 176.7 ± 81.8 | 1263.7 ± 527.3 | 838.6 ± 367.9 | −5.7 ± 4.1 | 73.6 ± 49 | 480.9 ± 163.9 |
| 24 | 236.5 ± 92 | 1324.7 ± 589.3 | 879.7 ± 321 | −0.4 ± 5.7 | 104 ± 53.1 | 498 ± 135.8 |

TABLE 28
Mean spot forming cells (SFC) per 10⁶ PBMCs for each epitope ± SEM for
priming vaccination with VEE-MAG25mer srRNA-LNP2 (300 μg) (Group 2)

| | Antigen | | | | | |
|---|---|---|---|---|---|---|
| Wk | Env CL9 | Env TL9 | Gag CM9 | Gag LW9 | Pol SV9 | Tat TL8 |
| 4 | 46 ± 27.1 | 18.4 ± 6.8 | 58.3 ± 45.8 | 29.9 ± 20.8 | 4.9 ± 2.3 | 10.7 ± 4 |
| 5 | 85.4 ± 54 | 5.2 ± 5.8 | 52.4 ± 51.2 | 34.5 ± 35 | 11.8 ± 12.2 | 14.4 ± 7.9 |
| 7 | 18.6 ± 32.5 | 1.9 ± 1.7 | 59.4 ± 55.7 | 9.3 ± 10.7 | 3.3 ± 3 | 10.7 ± 6.1 |
| 8 | 36.6 ± 39.4 | 6.3 ± 3.9 | 48.7 ± 39.9 | 13.5 ± 8.8 | 3.8 ± 3.6 | 17.2 ± 9.7 |
| 10 | 69.1 ± 59.1 | 4.4 ± 1.9 | 39.3 ± 38 | 14.7 ± 10.8 | 4.4 ± 5.3 | 8.5 ± 5.3 |
| 11 | 43 ± 38.8 | 22.6 ± 21.1 | 30.2 ± 26.2 | 3.3 ± 2.2 | 5.8 ± 3.5 | 40.3 ± 25.5 |
| 13 | 120.4 ± 78.3 | 68.2 ± 43.9 | 54.2 ± 36.8 | 21.8 ± 7.4 | 17.7 ± 6.1 | 47.4 ± 27.3 |
| 14 | 76 ± 44.8 | 28 ± 19.5 | 65.9 ± 64.3 | −0.3 ± 1.3 | 2.5 ± 2 | 31.1 ± 26.5 |
| 15 | 58.9 ± 41.4 | 19.5 ± 15.1 | 55.4 ± 51 | 2.5 ± 2 | 5.5 ± 3.6 | 20.1 ± 15.7 |

TABLE 29
Mean spot forming cells (SFC) per 10⁶ PBMCs for each epitope ± SEM for
priming vaccination with VEE-MAG25mer srRNA-LNP1 (300 μg) (Group 3)

| | Antigen | | | | | |
|---|---|---|---|---|---|---|
| Wk | Env CL9 | Env TL9 | Gag CM9 | Gag LW9 | Pol SV9 | Tat TL8 |
| 4 | 19.5 ± 8.7 | 13.3 ± 13.1 | 16.5 ± 15.3 | 10.5 ± 7.3 | 35.9 ± 24.8 | 92.9 ± 91.6 |
| 5 | 87.9 ± 43.9 | 12.7 ± 11.7 | 37.2 ± 31.9 | 21.1 ± 23.8 | 13.2 ± 13.7 | 12.6 ± 13.7 |
| 7 | 21.1 ± 13.3 | 48.8 ± 48.4 | 51.7 ± 39.5 | 9.1 ± 10.5 | 58.6 ± 55.8 | 159.4 ± 159 |
| 8 | 47.7 ± 21.7 | 66.4 ± 52.2 | 59.8 ± 57.4 | 49.4 ± 28 | 79.4 ± 63 | 133.8 ± 132.1 |
| 10 | 49 ± 30.2 | 42.2 ± 41.1 | 139.3 ± 139.3 | 51.6 ± 51.2 | 78.2 ± 75.8 | 131.7 ± 131.6 |
| 11 | 42 ± 26.8 | 20.9 ± 21.4 | 177.1 ± 162 | −6.3 ± 4.3 | 104.3 ± 104.1 | 231.5 ± 230.1 |
| 12 | 40.2 ± 19 | 20.3 ± 11.9 | 42.2 ± 46.7 | 3.7 ± 6.7 | 57 ± 44.7 | 70 ± 69.2 |
| 13 | 81.2 ± 48.9 | 38.2 ± 37.6 | 259.4 ± 222.2 | −4 ± 4.1 | 164.1 ± 159.3 | 347.3 ± 343.5 |
| 14 | 34.5 ± 31.8 | 5.3 ± 11.6 | 138.6 ± 137.3 | −4.7 ± 5.2 | 52.3 ± 52.9 | 142.6 ± 142.6 |
| 15 | 49 ± 24 | 6.7 ± 9.8 | 167.1 ± 163.8 | −6.4 ± 4.2 | 47.8 ± 42.3 | 116.6 ± 114.5 |

[0571] srRNA Dose Ranging Study

[0572] In one implementation of the present invention, an srRNA dose ranging study can be conducted in mamu A01 Indian rhesus macaques to identify which srRNA dose to progress to NHP immunogenicity studies. In one example, Mamu A01 Indian rhesus macaques can be administered with an srRNA vector encoding model antigens that includes multiple mamu A01 restricted epitopes by IM injection. In another example, an anti-CTLA-4 monoclonal antibody can be administered SC proximal to the site of IM vaccine injection to target the vaccine draining lymph node in one group of animals. PBMCs can be collected every 2 weeks after the initial vaccination for immune monitoring. The study arms are described in below (Table 30).

TABLE 30
Non-GLP RNA dose ranging study in Indian Rhesus Macaques

| Group | Prime | Boost 1 | Boost 2 |
|---|---|---|---|
| 1 | srRNA-LNP (Low Dose) | srRNA-LNP (Low Dose) | srRNA-LNP (Low Dose) |
| 2 | srRNA-LNP (Mid Dose) | srRNA-LNP (Mid Dose) | srRNA-LNP (Mid Dose) |
| 3 | srRNA-LNP (High Dose) | srRNA-LNP (High Dose) | srRNA-LNP (High Dose) |
| 4 | srRNA-LNP (High Dose) + | srRNA-LNP (High Dose) + | srRNA-LNP (High Dose) + |
| | anti-CTLA-4 | anti-CTLA-4 | anti-CTLA-4 |

* Dose range of srRNA to be determined with the high dose ≤300 μg.

[0573] Immunogenicity Study in Indian Rhesus Macaques

[0574] Vaccine studies were conducted in mamu A01 Indian rhesus macaques (NHPs) to demonstrate immunogenicity using the antigen vectors. FIG. 34 illustrates the vaccination strategy. Three groups of NHPs were immunized with ChAdV68.5-WTnt.MAG25mer and either with the checkpoint inhibitor anti-CTLA-4 antibody Ipilimumab (Groups 5 & 6) or without the checkpoint inhibitor (Group 4). The antibody was administered either intra-venously (group 5) or subcutaneously (group 6). Triangles indicate chAd68 vaccination (1e12 vp/animal) at weeks 0 & 32. Circles represent alphavirus vaccination at weeks 0, 4, 12, 20, 28 and 32.

[0575] The time course of CD8+ anti-epitope responses in the immunized NHPs are presented for chAd-MAG immunization alone (FIG. 35 and Table 31A), chAd-MAG immunization with the checkpoint inhibitor delivered IV (FIG. 36 and Table 31B), and chAd-MAG immunization with the checkpoint inhibitor delivered SC (FIG. 37 and Table 31C). The results demonstrate chAd68 vectors efficiently primed CD8+ responses in primates, alphavirus vectors efficiently boosted the chAD68 vaccine priming response, checkpoint inhibitor whether delivered IV or SC amplified both priming and boosting responses, and chAd vectors readministered post vaccination to effectively boosted the immune responses.

TABLE 31A
CD8+ anti-epitope responses in Rhesus Macaques dosed with chAd-MAG (Group
4). Mean SFC/1e6 splenocytes +/− the standard error is shown

| | Antigen | | | | | |
|---|---|---|---|---|---|---|
| Wk | Env CL9 | Env TL9 | Gag CM9 | Gag LW9 | Pol SV9 | Tat TL8 |
| 4 | 173 ± 41.6 | 373.5 ± 87.3 | 461.4 ± 74.2 | 38.4 ± 26.1 | 94.5 ± 26 | 609.2 ± 121.9 |
| 5 | 412.7 ± 138.4 | 987.8 ± 283.3 | 1064.4 ± 266.9 | 85.6 ± 31.2 | 367.2 ± 135.2 | 1306.8 ± 332.8 |
| 6 | 116.2 ± 41.2 | 231.1 ± 46.3 | 268.3 ± 90.7 | 86.1 ± 42 | 174.3 ± 61 | 223.9 ± 38.1 |
| 7 | 287.4 ± 148.7 | 588.9 ± 173.9 | 693.2 ± 224.8 | 92.1 ± 33.5 | 172.9 ± 55.6 | 694.6 ± 194.8 |
| 8 | 325.4 ± 126.6 | 735.8 ± 212 | 948.9 ± 274.5 | 211.3 ± 62.7 | 179.1 ± 50 | 817.3 ± 185.2 |
| 10 | 312 ± 129.7 | 543.2 ± 188.4 | 618.6 ± 221.7 | −5.7 ± 4.1 | 136.5 ± 51.3 | 309.9 ± 85.6 |
| 11 | 248.5 ± 81.1 | 348.7 ± 129.8 | 581.1 ± 205.5 | −3.1 ± 4.4 | 119 ± 51.2 | 413.7 ± 144.8 |
| 12 | 261.9 ± 68.2 | 329.9 ± 83 | 486.5 ± 118.6 | −1.2 ± 5.1 | 132.8 ± 31.8 | 350.9 ± 69.3 |
| 13 | 389.3 ± 167.7 | 1615.8 ± 418.3 | 1244.3 ± 403.6 | 1.3 ± 8.1 | 522.5 ± 155 | 1303.3 ± 385.6 |
| 14 | 406.3 ± 121.6 | 1616 ± 491.7 | 1142.3 ± 247.2 | 6.6 ± 11.1 | 322.7 ± 94.1 | 1048.6 ± 215.6 |
| 15 | 446.8 ± 138.7 | 1700.8 ± 469.1 | 1306.3 ± 294.4 | 43 ± 24.5 | 421.2 ± 87.9 | 1001.5 ± 236.4 |
| 16 | 686.8 ± 268.8 | 1979.5 ± 541.7 | 1616.8 ± 411.8 | 2.4 ± 7.8 | 381.9 ± 116.4 | 1152.8 ± 352.7 |
| 17 | 375.8 ± 109.3 | 1378.6 ± 561.2 | 773.1 ± 210.3 | −1.4 ± 4.3 | 177.6 ± 93.7 | 691.7 ± 245 |
| 18 | 255.9 ± 99.7 | 1538.4 ± 498.1 | 498.7 ± 152.3 | −5.3 ± 3.3 | 26.2 ± 13.4 | 413.9 ± 164.8 |
| 19 | 133 ± 62.6 | 955.9 ± 456.8 | 491.1 ± 121.8 | −5.7 ± 4.1 | 50.3 ± 25.4 | 371.2 ± 123.7 |
| 20 | 163.7 ± 55.8 | 641.7 ± 313.5 | 357.9 ± 91.1 | 2.6 ± 7.5 | 41.4 ± 24.2 | 257.8 ± 68.9 |
| 21 | 319.9 ± 160.5 | 2017.1 ± 419.9 | 1204.8 ± 335.2 | −3.7 ± 5.1 | 268.1 ± 109.6 | 924.1 ± 301 |
| 22 | 244.7 ± 105.6 | 1370.9 ± 563.5 | 780.3 ± 390 | −3.6 ± 5.1 | 118.2 ± 68.1 | 473.3 ± 249.3 |
| 23 | 176.7 ± 81.8 | 1263.7 ± 527.3 | 838.6 ± 367.9 | −5.7 ± 4.1 | 73.6 ± 49 | 480.9 ± 163.9 |
| 24 | 236.5 ± 92 | 1324.7 ± 589.3 | 879.7 ± 321 | −0.4 ± 5.7 | 104 ± 53.1 | 498 ± 135.8 |
| 25 | 136.4 ± 52.6 | 1207.1 ± 501.6 | 924 ± 358.5 | 6.2 ± 10.5 | 74.1 ± 34.4 | 484.6 ± 116.7 |
| 26 | 278.2 ± 114.4 | 1645 ± 661.7 | 1170.2 ± 469.9 | −2.9 ± 5.7 | 80.6 ± 55.8 | 784.4 ± 214.1 |
| 27 | 159 ± 56.8 | 961.7 ± 547.1 | 783.6 ± 366.4 | −5 ± 4.3 | 63.6 ± 27.5 | 402.9 ± 123.4 |
| 28 | 189.6 ± 75.7 | 1073.1 ± 508.8 | 668.3 ± 312.5 | −5.7 ± 4.1 | 80.3 ± 38.3 | 386.4 ± 122 |
| 29 | 155.3 ± 69.1 | 1102.9 ± 606.1 | 632.9 ± 235 | 34.5 ± 24.2 | 80 ± 35.5 | 422.5 ± 122.9 |
| 30 | 160.2 ± 59.9 | 859 ± 440.9 | 455 ± 209.1 | −3 ± 5.3 | 60.5 ± 28.4 | 302.7 ± 123.2 |
| 31 | 122.2 ± 49.7 | 771.1 ± 392.7 | 582.2 ± 233.5 | −5.7 ± 4.1 | 55.1 ± 27.3 | 295.2 ± 68.3 |
| 32 | 119.3 ± 28.3 | 619.4 ± 189.7 | 566 ± 222.1 | −3.7 ± 5.1 | 21.9 ± 4.5 | 320.5 ± 76.4 |
| 33 | 380.5 ± 122 | 1636.1 ± 391.4 | 1056.2 ± 205.7 | −5.7 ± 4.1 | 154.5 ± 38.5 | 988.4 ± 287.7 |
| 34 | 1410.8 ± 505.4 | 972.4 ± 301.5 | 319.6 ± 89.6 | −4.8 ± 4.2 | 141.1 ± 49.8 | 1375.5 ± 296.7 |
| 37 | 130.8 ± 29.2 | 500 ± 156.9 | 424.9 ± 148.9 | −3.5 ± 4.7 | 77.7 ± 24.6 | 207.1 ± 42.4 |
| 38 | 167.7 ± 54.8 | 1390.8 ± 504.7 | 830.4 ± 329.1 | −5.5 ± 4.1 | 111.8 ± 43.2 | 516 ± 121.7 |

TABLE 31B
CD8+ anti-epitope responses in Rhesus Macaques dosed with chAd-MAG plus anti-CTLA4 antibody
(Ipilimumab) delivered IV. (Group 5). Mean SFC/1e6 splenocytes +/− the standard error is shown

| | Antigen | | | | | |
|---|---|---|---|---|---|---|
| Wk | Env CL9 | Env TL9 | Gag CM9 | Gag LW9 | Pol SV9 | Tat TL8 |
| 4 | 1848.1 ± 432.2 | 1295.7 ± 479.7 | 1709.8 ± 416.9 | 513.7 ± 219.8 | 838.5 ± 221.1 | 2514.6 ± 246.5 |
| 5 | 1844.1 ± 410.2 | 2367.5 ± 334.4 | 1983.1 ± 370.7 | 732.1 ± 249.4 | 1429.7 ± 275.3 | 2517.7 ± 286.5 |
| 6 | 822.4 ± 216.7 | 1131.2 ± 194.7 | 796.8 ± 185.8 | 226.8 ± 70 | 802.2 ± 101.4 | 913.5 ± 222.7 |
| 7 | 1147.2 ± 332.9 | 1066 ± 311.2 | 1149.8 ± 467.3 | 267.4 ± 162.6 | 621.5 ± 283.2 | 1552.2 ± 395.1 |
| 8 | 1192.7 ± 188.8 | 1461.5 ± 237.7 | 1566.9 ± 310.5 | 522.5 ± 118.6 | 662.3 ± 142.4 | 1706 ± 216.7 |
| 10 | 1249 ± 220.3 | 1170.6 ± 227.7 | 1297.3 ± 264.7 | −0.3 ± 4.4 | 551.8 ± 90.5 | 1425.3 ± 142.6 |
| 11 | 934.2 ± 221.7 | 808 ± 191.3 | 1003.1 ± 293.4 | 1.9 ± 4.3 | 364.2 ± 76.6 | 1270.8 ± 191.6 |
| 12 | 1106.2 ± 216.6 | 896.7 ± 190.7 | 1020.1 ± 243.3 | 1.3 ± 3.9 | 436.6 ± 90 | 1222 ± 155.4 |
| 13 | 2023.8 ± 556.3 | 3696.7 ± 1.7 | 2248.5 ± 436.4 | −4.5 ± 3.5 | 2614 ± 406.1 | 3700 ± 0 |
| 14 | 1278.7 ± 240 | 2639.5 ± 387 | 1654.6 ± 381.1 | −6 ± 2.1 | 988.8 ± 197.9 | 2288.3 ± 298.7 |
| 15 | 1458.9 ± 281.8 | 2932.5 ± 488.7 | 1893.4 ± 499 | 74.6 ± 15.6 | 1657.8 ± 508.9 | 2709.1 ± 428.7 |
| 16 | 1556.8 ± 243 | 2143.8 ± 295.2 | 2082.8 ± 234.2 | −5.8 ± 2.5 | 1014.6 ± 161.4 | 2063.7 ± 86.7 |
| 17 | 1527 ± 495.1 | 2213 ± 677.1 | 1767.7 ± 391.8 | 15.1 ± 5.9 | 633.8 ± 133.9 | 2890.8 ± 433.9 |
| 18 | 1068.2 ± 279.9 | 1940.9 ± 204.1 | 1114.1 ± 216.1 | −5.8 ± 2.5 | 396.6 ± 77.6 | 1659.4 ± 171.7 |
| 19 | 760.7 ± 362.2 | 1099.5 ± 438.4 | 802.7 ± 192.5 | −2.4 ± 3.3 | 262.2 ± 62.2 | 1118.6 ± 224.2 |
| 20 | 696.3 ± 138.2 | 954.9 ± 198 | 765.1 ± 248.4 | −1.4 ± 4.4 | 279.6 ± 89.3 | 1139 ± 204.5 |
| 21 | 1201.4 ± 327.9 | 3096 ± 1.9 | 1901 ± 412.1 | −5.8 ± 2.5 | 1676.3 ± 311.5 | 2809.3 ± 195.8 |
| 22 | 1442.5 ± 508.3 | 2944.7 ± 438.6 | 1528.4 ± 349.6 | 2.8 ± 5.1 | 940.7 ± 160.5 | 2306.3 ± 218.6 |
| 23 | 1400.4 ± 502.2 | 2757.1 ± 452.9 | 1604.2 ± 450.1 | −5.1 ± 2.3 | 708.1 ± 162.6 | 2100.4 ± 362.9 |
| 24 | 1351 ± 585.1 | 2264.5 ± 496 | 1080.6 ± 253.8 | 0.3 ± 6.5 | 444.2 ± 126.4 | 1823.7 ± 306.5 |
| 25 | 1211.5 ± 505.2 | 2160.4 ± 581.8 | 970.8 ± 235.9 | 2.5 ± 3.8 | 450.4 ± 126.9 | 1626.2 ± 261.3 |
| 26 | 1443 ± 492.5 | 2485 ± 588 | 1252.5 ± 326.4 | −0.2 ± 6 | 360.2 ± 92.3 | 2081.9 ± 331.1 |
| 27 | 896.2 ± 413.3 | 1686 ± 559.5 | 751 ± 192.1 | −3.7 ± 2.5 | 247.4 ± 82.8 | 1364.1 ± 232 |
| 28 | 1147.8 ± 456.9 | 1912.1 ± 417.1 | 930.3 ± 211.4 | −5.8 ± 2.5 | 423.9 ± 79.6 | 1649.3 ± 315 |
| 29 | 1038.5 ± 431.9 | 1915.2 ± 626.1 | 786.8 ± 205.9 | 23.5 ± 8.3 | 462.8 ± 64 | 1441.5 ± 249.7 |
| 30 | 730.5 ± 259.3 | 1078.6 ± 211.5 | 699.1 ± 156.2 | −4.4 ± 2.7 | 234.4 ± 43.9 | 1160.6 ± 112.6 |
| 31 | 750.4 ± 328.3 | 1431 ± 549.9 | 650.6 ± 141.1 | −5.2 ± 3 | 243.4 ± 56.4 | 868.9 ± 142.8 |
| 32 | 581.4 ± 227.7 | 1326.6 ± 505.2 | 573.3 ± 138 | −3.2 ± 4.2 | 160.8 ± 49.2 | 936.4 ± 110.4 |
| 33 | 2198.4 ± 403.8 | 3093.4 ± 123.3 | 2391.8 ± 378.4 | 7.1 ± 8.5 | 1598.1 ± 343.1 | 2827.5 ± 289.5 |
| 34 | 2654.3 ± 337 | 2709.9 ± 204.3 | 1297.5 ± 291.4 | 0.4 ± 4.2 | 1091.8 ± 242.9 | 1924 ± 245.7 |
| 37 | 846.8 ± 301.7 | 1706.9 ± 196 | 973.6 ± 149.3 | 50.5 ± 45.2 | 777.3 ± 140.2 | 1478.8 ± 94.3 |

TABLE 31C
CD8+ anti-epitope responses in Rhesus Macaques dosed with chAd-MAG plus anti-CTLA4 antibody
(Ipilimumab) delivered SC (Group 6). Mean SFC/1e6 splenocytes +/− the standard error is shown

| | Antigen | | | | | |
|---|---|---|---|---|---|---|
| Wk | Env CL9 | Env TL9 | Gag CM9 | Gag LW9 | Pol SV9 | Tat TL8 |
| 4 | 598.3 ± 157.4 | 923.7 ± 306.8 | 1075.6 ± 171.8 | 180.5 ± 74.1 | 752.3 ± 245.8 | 1955.3 ± 444.4 |
| 5 | 842.2 ± 188.5 | 1703.7 ± 514.2 | 1595.8 ± 348.4 | 352.7 ± 92.3 | 1598.9 ± 416.8 | 2163.7 ± 522.1 |
| 6 | 396.4 ± 45.3 | 728.3 ± 232.7 | 503.8 ± 151.9 | 282 ± 69 | 463.1 ± 135.7 | 555.2 ± 191.5 |
| 7 | 584.2 ± 177 | 838.3 ± 254.9 | 1013.9 ± 349.4 | 173.6 ± 64.3 | 507.4 ± 165.7 | 1222.8 ± 368 |
| 8 | 642.9 ± 134 | 1128.6 ± 240.6 | 1259.1 ± 163.8 | 366.1 ± 72.8 | 726.7 ± 220.9 | 1695.6 ± 359.4 |
| 10 | 660.4 ± 211.4 | 746.9 ± 222.7 | 944.8 ± 210.2 | −1.2 ± 1.9 | 523.4 ± 230.7 | 787.3 ± 308.3 |
| 11 | 571.2 ± 162 | 609.4 ± 194.3 | 937.9 ± 186.5 | −8.9 ± 2.3 | 511.6 ± 229.6 | 1033.3 ± 315.7 |
| 12 | 485.3 ± 123.7 | 489.4 ± 142.7 | 919.3 ± 214.1 | −8.9 ± 2.3 | 341.6 ± 139.4 | 1394.7 ± 432.1 |
| 13 | 986.9 ± 154.5 | 2811.9 ± 411.3 | 1687.7 ± 344.3 | −4.1 ± 5.1 | 1368.5 ± 294.2 | 2751 ± 501.9 |
| 14 | 945.9 ± 251.4 | 2027.7 ± 492.8 | 1386.7 ± 326.7 | −5.7 ± 2.8 | 708.9 ± 277.1 | 1588.2 ± 440.1 |
| 15 | 1075.2 ± 322.4 | 2386 ± 580.7 | 1606.3 ± 368.1 | −5.4 ± 3.2 | 763.3 ± 248.8 | 1896.5 ± 507.8 |
| 16 | 1171.8 ± 341.6 | 2255.1 ± 439.6 | 1672.2 ± 342.3 | −7.8 ± 2.4 | 1031.6 ± 228.8 | 1896.4 ± 419.9 |
| 17 | 1118.2 ± 415.4 | 2156.3 ± 476 | 1345.3 ± 377.7 | −1.1 ± 6.7 | 573.7 ± 118.8 | 1614.4 ± 382.3 |
| 18 | 861.3 ± 313.8 | 2668.2 ± 366.8 | 1157.2 ± 259.6 | −8.9 ± 2.3 | 481.2 ± 164 | 1725.8 ± 511.4 |
| 19 | 719.2 ± 294.2 | 1447.2 ± 285 | 968 ± 294.5 | −2.2 ± 4.6 | 395.6 ± 106.1 | 1199.6 ± 289.2 |
| 20 | 651.6 ± 184 | 1189.8 ± 242.8 | 947.4 ± 249.8 | −8.9 ± 2.3 | 355 ± 106.3 | 1234.7 ± 361.7 |
| 21 | 810.3 ± 301.9 | 2576.2 ± 283.7 | 1334 ± 363.1 | −8.9 ± 2.3 | 892.2 ± 305 | 1904.4 ± 448.1 |
| 22 | 775 ± 196.4 | 2949 ± 409.7 | 1421.8 ± 309.7 | 38 ± 27.8 | 577 ± 144.2 | 2330.6 ± 572.3 |
| 23 | 584.9 ± 240.2 | 1977.9 ± 361.4 | 1209.8 ± 405.1 | −7.3 ± 3.2 | 273.7 ± 93.3 | 1430.6 ± 363.9 |
| 24 | 485.4 ± 194.4 | 1819.8 ± 325.5 | 837.2 ± 261.4 | −3.4 ± 4.1 | 234.4 ± 71.1 | 943.9 ± 243.3 |
| 25 | 452.3 ± 175 | 2072 ± 405.7 | 957.1 ± 293.1 | −8.9 ± 2.3 | 163 ± 43.2 | 1341.2 ± 394.7 |
| 26 | 517.9 ± 179.1 | 2616 ± 567.5 | 1126.6 ± 289 | −8.3 ± 2.3 | 199.9 ± 89.2 | 1615.7 ± 385.6 |
| 27 | 592.8 ± 171.7 | 1838.3 ± 372.4 | 749.3 ± 170.4 | −7.3 ± 2.5 | 325.5 ± 98.7 | 1110.7 ± 308.8 |
| 28 | 793 ± 228.5 | 1795.4 ± 332.3 | 1068.7 ± 210.3 | 2.5 ± 4.1 | 553.1 ± 144.3 | 1480.8 ± 357.1 |
| 29 | 661.8 ± 199.9 | 2140.6 ± 599.3 | 1202.7 ± 292.2 | −8.7 ± 2.8 | 558.9 ± 279.2 | 1424.2 ± 408.6 |
| 30 | 529.1 ± 163.3 | 1528.2 ± 249.8 | 840.5 ± 218.3 | −8.9 ± 2.3 | 357.7 ± 149.4 | 1029.3 ± 335 |
| 31 | 464.8 ± 152.9 | 1332.2 ± 322.7 | 726.3 ± 194.3 | −8.9 ± 2.3 | 354.3 ± 158.6 | 884.4 ± 282 |
| 32 | 612.9 ± 175.3 | 1584.2 ± 390.2 | 1058.3 ± 219.8 | −8.7 ± 2.8 | 364.6 ± 149.8 | 1388.8 ± 467.3 |
| 33 | 1600.2 ± 416.7 | 2597.4 ± 367.9 | 2086.4 ± 414.8 | −6.3 ± 3.3 | 893.8 ± 266 | 2490.6 ± 416.4 |
| 34 | 2814.6 ± 376.2 | 2713.6 ± 380.8 | 1888.8 ± 499.4 | −7.5 ± 3.1 | 1288.9 ± 438.9 | 2428.1 ± 458.9 |
| 37 | 1245.9 ± 471.7 | 1877.7 ± 291.2 | 1606.6 ± 441.9 | 14.2 ± 13 | 1227.5 ± 348.1 | 1260.7 ± 342 |

[0576] Memory Phenotyping in Indian Rhesus Macaques

[0577] Rhesus macaque were immunized with ChAdV68.5WTnt.MAG25mer/VEE-MAG25mer srRNA heterologous prime/boost regimen with or without anti-CTLA4, and boosted again with ChAdV68.5WTnt.MAG25mer. Groups were assessed 11 months after the final ChAdV68 administration (study month 18). by ELISpot was performed as described. FIG. 38 and Table 43 shows cellular responses to six different Mamu-A*01 restricted epitopes as measured by ELISpot both pre-immunization (left panel) and after 18 months (right panel). The detection of responses to the restricted epitopes demonstrates antigen-specific memory responses were generated by ChAdV68/samRNA vaccine protocol.

[0578] To assess memory, CD8+ T-cells recognizing 4 different rhesus macaque Mamu-A*01 class I epitopes encoded in the vaccines were monitored using dual-color Mamu-A*01 tetramer labeling, with each antigen being represented by a unique double positive combination, and allowed the identification of all 4 antigen-specific populations within a single sample. Memory cell phenotyping was performed by co-staining with the cell surface markers CD45RA and CCR7. FIG. 39 and Table 44 shows the results of the combinatorial tetramer staining and CD45RA/CCR7 co-staining for memory T-cells recognizing four different Mamu-A*01 restricted epitopes. The T cell phenotypes were also assessed by flow cytometry. FIG. 40 shows the distribution of memory cell types within the sum of the four Mamu-A*01 tetramer+CD8+ T-cell populations at study month 18. Memory cells were characterized as follows: CD45RA+CCR7+=naïve, CD45RA+CCR7−=effector (Teff), CD45RA−CCR7+=central memory (Tcm), CD45RA−CCR7−=effector memory (Tem). Collectively, the results demonstrate that memory responses were detected at least one year following the last boost indicating long lasting immunity, including effector, central memory, and effector memory populations.

TABLE 43
Mean spot forming cells (SFC) per 10⁶ PBMCs for each animal at
both pre-prime and memory assessment time points (18 months).

| | Pre-prime baseline | | | | | | 18 months | | | | | |
|---|---|---|---|---|---|---|---|---|---|---|---|---|
| | Tat | Gag | Env | Env | Gag | Pol | Tat | Gag | Env | Env | Gag | Pol |
| Animal | TL8 | CM9 | TL9 | CL9 | LW9 | SV9 | TL8 | CM9 | TL9 | CL9 | LW9 | SV9 |
| 1 | 1.7 | 0.0 | 0.0 | 5.0 | 0.0 | 13.7 | 683.0 | 499.2 | 1100.3 | 217.5 | 47.7 | 205.3 |
| 2 | 0.0 | 0.0 | 0.0 | 0.2 | 0.1 | 0.0 | 773.4 | ND | 1500.0 | 509.3 | 134.5 | 242.5 |
| 3 | 0.0 | 0.0 | 6.7 | 6.8 | 10.2 | 3.3 | 746.3 | 167.5 | 494.1 | 402.8 | 140.6 | 376.0 |
| 4 | 0.0 | 0.0 | 0.0 | 0.0 | 0.0 | 0.0 | 47.6 | 1023.9 | 85.1 | 44.2 | 44.2 | 47.6 |
| 5 | 15.3 | 6.7 | 18.6 | 15.6 | 5.2 | 12.1 | 842.4 | 467.7 | 1500.0 | 805.9 | 527.8 | 201.8 |
| 6 | 3.1 | 0.0 | 0.0 | 15.5 | 6.9 | 5.3 | 224.3 | 720.3 | 849.0 | 296.9 | 32.4 | 121.9 |

ND = not determined due to technical exclusion

TABLE 44
Percent Mamu-A*01 tetramer positive out of live CD8+ cells

| Animal | Tat TL8 | Gag CM9 | Env TL9 | Env CL9 |
|---|---|---|---|---|
| 1 | 0.42 | 0.11 | 0.19 | 0.013 |
| 2 | 0.36 | 0.048 | 0.033 | 0.00834 |
| 3 | 0.97 | 0.051 | 0.35 | 0.048 |
| 4 | 0.46 | 0.083 | 0.17 | 0.028 |
| 5 | 0.77 | 0.45 | 0.14 | 0.2 |
| 6 | 0.71 | 0.16 | 0.17 | 0.04 |

### XIX. Co-Expression of an Anti-CTLA4 Immune Checkpoint Inhibitor

[0579] Vector(s) were engineered that co-expressed antigens and an immune checkpoint inhibitor.

[0580] Materials and Methods

[0581] In one example, a chimpanzee adenoviral viral vector was designed to express both model antigens and the immune checkpoint inhibitor, anti-CTLA4.

### Vector Design

[0582] An E1/E3 deleted ChAdV68 viral vector was designed with an expression cassette in the following orientation from 5′ to 3′ introduced into the deleted E1 region in the following format (See FIG. 26): [CMV—model-antigens/GFP—RES—Anti-CTLA4—SV40]. Cassette expression was driven by a cytomegalovirus (CMV) promoter located 5′ of the model antigen cassette (or GFP reporter) and the SV-40 polyadenylation signal 3′ of the anti-CTLA4 antibody. The model antigen cassette was the MAG25mer cassette described above in Section XIV.B.4 (SEQ ID NO: 34). The antigen cassette (or GFP reporter) and the anti-CTLA4 antibody were separated by an IRES sequence, which enables separate translation of the model antigens and the anti-CTLA4 antibody from the same transcript. The anti-CTLA4 antibody nucleotide sequences were based on the anti-CTLA4 clone 9D9 sequences available on Genbank (NCBI ID LQ222660.1 and LQ222658.1) and described further in PCT publication WO2016025642, herein incorporated by reference for all it teaches. The anti-CTLA4 antibody expression cassette was designed in the following format: [Full length heavy chain—Furin cleavage site—T2A site—Full length light chain], as described (Fang J, Qian J J, Yi S, Harding T C, Tu G H, Van Roey M, Jooss K. (2005). Stable antibody expression at therapeutic levels using the 2A peptide. Nat Biotechnol. 23(5):584-90), where the T2A site is a Thosea asigna virus 2A peptide. The variable regions were appended to the constant region of mouse IgG2b, corresponding to 9D9's original isotype. The nucleotide sequences were also codon optimized for expression relative to the Genbank sequences.

[0583] Two versions of the GFP reporter expressing construct were made: one with antibody leader sequences using the NCBI sequences (g9D9, SEQ ID NO: 60) and the other with the leader sequences based on the sequences predicted to be present in the original mouse 9D9 hybridoma by IgBLAST tool (o9D9, SEQ ID NO: 61).

[0584] The model antigen expressing construct was made with the “o9D9” antibody leader sequences described above. The full-length sequence for the chimpanzee C68 adenoviral construct expressing the model antigens and anti-CTLA4 (“chAd-MAG-CTLA4”) is described below (SEQ ID NO: 57).

[0585] Additional checkpoint immune checkpoint inhibitor co-expression vectors were generated: a chimpanzee C68 adenoviral construct expressing the GFP reporter or model antigen cassette, as well as a sequence encoding anti-CTLA4 antibody Ipilimumab (chAd68-GFP-IRES-IPI “IPI-GFP” and chAd68-MAG-IRES-IPI “IPI-MAG”; SEQ ID NO: 70 and 71, respectively); a chimpanzee C68 adenoviral construct expressing the model antigen cassette and a sequence encoding anti-CTLA4 antibody Tremelimumab (chAd68-MAG-IRES-TREME; SEQ ID NO: 72).

### Vector Production

[0586] The anti-CTLA4 expressing viral vectors were generated by transfecting PacI digested pA68-MAG-o9D9 (plasmid containing the ChAdV68 vector that expresses the model antigen cassette and the o9D9 version of anti-CTLA4), pA68-GFP-IRES-o9D9 (plasmid containing the ChAdV68 vector that expresses the GFP reporter and the o9D9 version of anti-CTLA4) and pA68-GFP-IRES-g9D9 (plasmid containing the ChAdV68 vector that expresses the GFP reporter and the g9D9 version of anti-CTLA4) into 293A cells using Fugene 6 (Promega). The viral vectors underwent expansion in 293 cells before large scale production (400 mL scale) in 293F suspension cells. 48h post infection cells were harvested, lyzed and virus purified by two rounds of CsCl gradient. The virus was dialyzed into 20 mM Tris pH 8.0, 25 mM NaCl and 2.5% Glycerol. The purified viral vectors were aliquoted and stored at −80° C. The infectious unit titer of the purified viral vectors was determined using an anti-capsid assay. For in vitro and in vivo experiments, dosing was based on IU titers.

### In Vitro Expression

[0587] 293F cells were infected with the viral vectors described below at an MOI of 1. Post infection, the supernatant was harvested, and the antibody recovered using Protein A beads. The antibody was eluted from the beads and separated on a 4-20% SDS-PAGE gel. The gel was subjected to Western Blot analysis using a goat anti-Mouse, HRP-conjugated antibody (Millipore, AP124P) at 1:2,500 dilution in TBST-5% dry milk, followed by chemiluminescent detection reagent (Thermofisher, ECL Plus).

### In Vivo Evaluation

[0588] C56F1 mice were dosed with the viral vectors described below at either 1.5e7 or 1.5e6 IU, delivered via bilateral intramuscular (IM) injections to the tibialis anterior muscles. Mice that were coadministered anti-CTLA4 were delivered the antibody via intraperitoneal (IP) administration, 2×/week, at 250 ug. Groups, doses, routes and timing of injections are described below. Antigen-specific T-cells were measured by ELISpot and intracellular cytokine staining. Serum was obtained at various timepoints and anti-CTLA4 concentration was measured by ELISA.

[0589] Results

[0590] Virus was produced and quantified as described above. The titer data for the chAd68-o9D9 lot # CS110617E used in the in vivo studies is indicated below:

TABLE 32
Titer data of anti-CTLA4 clinical
cassette virus (chAd68-MAG-o9D9)

| Assay | Result | |
|---|---|---|
| Infectious Unit Titer | 3.06e8 | IU/mL |
| Viral Particle Titer | 3e12 | VP/mL |

### Anti-CTLA4 In Vitro Expression

[0591] 293F cells were infected with the following viral vectors: ChAdVC68-MAG25mer-IRES-o9D9 (“5WT-MAG-o9D9”), ChAdVC68-GFP-IRES-o9D9, and ChAdVC68-GFP-IRES-g9D9. Supernatent was collected at 7, 20, 30 and 48h hours post infection and, following antibody recovered using Protein A beads, was analyzed by Western. A commercial 9D9 antibody was used as a positive control (“(+) ctrl”). Supernatent from a viral vector encoding only GFP and not the anti-CTLA 9D9 antibody was used as a negative control (“(−) ctrl”). As shown in FIG. 27, bands correlating with the heavy and light chain of the 9D9 anti-CTLA4 positive control were present in the supernatents of the three vectors tested starting at 20h post infection, while no protein band was detected in the negative control lane, indicating each vector expressed the desired anti-CTLA4 antibodies. Protein was also not observed in the cell lysate only lane, i.e., sample without antibody recovery using Protein A beads (lane 2), demonstrating detection of expressed antibody required antibody recovery.

[0592] Next, in vitro expression was assessed for chAd68-GFP-IRES-IPI and chAd68-MAG-IRES-IPI. FIG. 28A demonstrates expression of the heavy chain and light chain of Ipilimumab. Next, in vitro expression was assessed for chAd68-MAG-IRES-TREME. FIG. 28B demonstrates expression of the heavy chain and light chain of Tremelimumab.

### In Vivo Evaluation of Vectors Co-Expressing Anti-CTLA4

[0593] The ChAdVC68-MAG25mer-IRES-o9D9 (“chAd-MAG-CTLA4”) co-expressing a model antigen cassette (MAG) and an anti-CTLA4 antibody (o9D9) was evaluated in mice for cellular antigen-specific immune response and anti-CTLA4 expression in serum. The co-expression vector treatment was compared to mice receiving either a vector that expresses the same model antigen cassette but does not express an anti-CTLA4 antibody (“chAd-MAG”), or the vector that expresses the same model antigen cassette but does not express an anti-CTLA4 antibody while being co-administered the 9D9 anti-CTLA4 antibody (purchased from BioXcell). chAd viruses were dosed by the IM route at either 1.5e7 or 1.5e6 IU. Co-administered anti-CTLA4 antibody was injected IP at a dose of 250 ug. The various groups are described in detail in the table below:

TABLE 33
Design of in vivo evaluation of chAd-MAG-
CTLA4 immunogenicity and expression

| Group | N | Virus | Dose | | Volume | | Schedule | Route |
|---|---|---|---|---|---|---|---|---|
| 1 | 8 | chAd-MAG-CTLA4 | 1.5e7 | IU | 2 × 50 | uL | Day 0 | IM |
| 2 | 8 | chAd-MAG-CTLA4 | 1.5e6 | IU | 2 × 50 | uL | Day 0 | IM |
| 3 | 8 | chAd-MAG | 1.5e7 | IU | 2 × 50 | uL | Day 0 | IM |
| | | aCTLA4 antibody | 250 | ug | 100 | uL | Day 0, 3, 6, 9 | IP |
| 4 | 8 | chAd-MAG | 1.5e6 | IU | 2 × 50 | uL | Day 0 | IM |
| | | aCTLA4 antibody | 250 | ug | 100 | uL | Day 0, 3, 6, 9 | IP |
| 5 | 8 | chAd-MAG | 1.5e7 | IU | 2 × 50 | uL | Day 0 | IM |
| 6 | 8 | chAd-MAG | 1.5e6 | IU | 2 × 50 | uL | Day 0 | IM |

[0594] Antigen-specific T-cells for MHC class I epitope AH1-A5 were measured by ELISpot and intracellular cytokine staining 12 days after vaccine administration. As shown in FIG. 41, the antigen-specific immune response measured by ELISpot at day 12 post immunization was equivalent for chAd-MAG-CTLA4, chAd-MAG alone, and chAd-MAG co-administered with anti-CTLA4 antibody delivered IP. The number of antigen-specific T-cells were similar for chAd-MAG-CTLA4, chAd-MAG+anti-CTLA4, and chAd-MAG, as measured by IFNγ-Elispot where median values were 11578, 12194, and 12945 SFC/1e6 splenocytes, respectively, for low dose of 1.5e6 IU (FIG. 41 left panel), and 18933, 17992, and 18766 SFC/1e6 splenocytes for high dose of 1.5e7 IU (FIG. 41 right panel).

[0595] As shown in FIG. 42, the three treatments also generated equivalent numbers of CD8+IFNγ*Antigen-specific T-cells for MHC class I epitope AH1-A5, as measured by ICS with median values of 3.7, 3.5 and 3.9 IFNγ (% of CD8+) at 1.5e6 IU (FIG. 42 left panel), and 8.4, 7.3 and 8.2 at 1.5e7 IU (FIG. 42 right panel).

[0596] No statistically significant differences, as determined by ANOVA, for the ELISpot or ICS analyses were found between groups. The results demonstrate that the chAd-MAG-aCTLA4 vaccine is functional, and at least by these assays equivalent, in driving an antigen-specific T-cell response in mice.

[0597] The amount of anti-CTLA4 antibody in the serum of mice was evaluated by mesoscale discovery (MSD) ELISA at 1, 2, 3, 6, and 12 days post-immunization with chAd-MAG-CTLA4 (groups 1 and 2), or chAd-MAG co-administered with anti-CTLA4 antibody delivered IP. For groups 3 and 4, anti-CTLA4 mAb (250 μg, IP) was administered on days 0, 3, 6, and 9.

[0598] As shown in FIG. 43 and Table 34, anti-CTLA4 expression was detected in the serum of mice immunized with chAd-MAG-CTLA4 at both low (1.5e6 IU) and high (1.5e7 IU) doses. Expression peaked at day 2 post immunization and was maintained above baseline values (day 0) until the final measurement at day 12, without additional immunizations. A dose-response in expression was observed, with higher levels detected at all timepoints with the higher dose of chAd-MAG-CTLA4. Serum levels of anti-CTLA4 were significantly lower than with IP delivery of the anti-CTLA4 mAb, which had levels greater than the maximum range of the assay at all timepoints post administration. These results demonstrate that the ChAd-MAG-aCTLA4 vaccine expresses anti-CTLA4 antibody at low, relative to repeated IP administration, but durable levels in a dose-dependent manner.

TABLE 34
Anti-CTLA4 antibody levels in the serum of mice

| | | | | | chAd-MAG, | | chAd-MAG, | |
|---|---|---|---|---|---|---|---|---|
| | chAd-MAG- | | chAd-MAG- | | 1.5e7 IU + | | 1.5e6 IU + | |
| | CTLA4, | | CTLA4, | | CTLA4 | | CTLA4 | |
| Timepoint | 1.5e7 IU | | 1.5e6 IU | | (250 ug, IP) | | (250 ug, IP) | |
| (weeks) | Mean | SD | Mean | SD | Mean | SD | Mean | SD |
| 0 | 591 | 512 | 345 | 77 | 821 | 692 | 681 | 862 |
| 1 | 29903 | 5455 | 1278 | 499 | 1723259 | 16272 | 1717583 | 33419 |
| 2 | 44656 | 13993 | 1756 | 933 | 1727280 | 11087 | 1717899 | 30496 |
| 3 | 39786 | 12746 | 1578 | 768 | 1724881 | 14540 | 1717923 | 30268 |
| 6 | 16757 | 5239 | 946 | 311 | 1724501 | 17319 | 1719999 | 32211 |
| 12 | 3536 | 1186 | 619 | 130 | 1666574 | 30887 | 1690529 | 36624 |

Mean ECL value for each group and timepoint.

Sequences

CATCaTCAATAATATACCTCAAACTTTTTGTGCGCGTTAATATGCAAATGAGGCGTTTGAATTTGGGGA
GGAAGGGCGGTGATTGGTCGAGGGATGAGCGACCGTTAGGGGCGGGGCGAGTGACGTTTTGATGACG
TGGTTGCGAGGAGGAGCCAGTTTGCAAGTTCTCGTGGGAAAAGTGACGTCAAACGAGGTGTGGTTTG
AACACGGAAATACTCAATTTTCCCGCGCTCTCTGACAGGAAATGAGGTGTTTCTGGGCGGATGCAAGT
GAAAACGGGCCATTTTCGCGCGAAAACTGAATGAGGAAGTGAAAATCTGAGTAATTTCGCGTTTATG
GCAGGGAGGAGTATTTGCCGAGGGCCGAGTAGACTTTGACCGATTACGTGGGGGTTTCGATTACCGT
GTTTTTCACCTAAATTTCCGCGTACGGTGTCAAAGTCCGGTGTTTTTACGTAGGTGTCAGCTGATCGCC
AGGGTATTTAAACCTGCGCTCTCCAGTCAAGAGGCCACTCTTGAGTGCCAGCGAGAAGAGTTTTCTCC
TCCGCGCCGCGAGTCAGATCTACACTTTGAAAGTAGGGATAACAGGGTAATgacattgattattgactagttGttaaT
AGTAATCAATTACGGGGTCATTAGTTCATAGCCCATATATGGAGTTCCGCGTTACATAACTTACGGTA
AATGGCCCGCCTGGCTGACCGCCCAACGACCCCCGCCCATTGACGTCAATAATGACGTATGTTCCCAT
AGTAACGCCAATAGGGACTTTCCATTGACGTCAATGGGTGGAGTATTTACGGTAAACTGCCCACTTGG
CAGTACATCAAGTGTATCATATGCCAAGTCCGCCCCCTATTGACGTCAATGACGGTAAATGGCCCGCC
TGGCATTATGCCCAGTACATGACCTTACGGGACTTTCCTACTTGGCAGTACATCTACGTATTAGTCATC
GCTATTACCATGgTGATGCGGTTTTGGCAGTACACCAATGGGCGTGGATAGCGGTTTGACTCACGGGG
ATTTCCAAGTCTCCACCCCATTGACGTCAATGGGAGTTTGTTTTGGCACCAAAATCAACGGGACTTTC
CAAAATGTCGTAATAACCCCGCCCCGTTGACGCAAATGGGCGGTAGGCGTGTACGGTGGGAGGTCTA
TATAAGCAGAgcTCGTTTAGTGAACCGTCAGATCGCCTGGAACGCCATCCACGCTGTTTTGACCTCCAT
AGAAGACAGCGATCGCGccaccATGGCCGGGATGTTCCAGGCACTGTCCGAAGGCTGCACACCCTATGA
TATTAACCAGATGCTGAATGTCCTGGGAGACCACCAGGTCTCTGGCCTGGAGCAGCTGGAGAGCATC
ATCAACTTCGAGAAGCTGACCGAGTGGACAAGCTCCAATGTGATGCCTATCCTGTCCCCACTGACCAA
GGGCATCCTGGGCTTCGTGTTTACCCTGACAGTGCCTTCTGAGCGGGGCCTGTCTTGCATCAGCGAGG
CAGACGCAACCACACCAGAGTCCGCCAATCTGGGCGAGGAGATCCTGTCTCAGCTGTACCTGTGGCC
CCGGGTGACATATCACTCCCCTTCTTACGCCTATCACCAGTTCGAGCGGAGAGCCAAGTACAAGAGAC
ACTTCCCAGGCTTTGGCCAGTCTCTGCTGTTCGGCTACCCCGTGTACGTGTTCGGCGATTGCGTGCAGG
GCGACTGGGATGCCATCCGGTTTAGATACTGCGCACCACCTGGATATGCACTGCTGAGGTGTAACGAC
ACCAATTATTCCGCCCTGCTGGCAGTGGGCGCCCTGGAGGGCCCTCGCAATCAGGATTGGCTGGGCGT
GCCAAGGCAGCTGGTGACACGCATGCAGGCCATCCAGAACGCAGGCCTGTGCACCCTGGTGGCAATG
CTGGAGGAGACAATCTTCTGGCTGCAGGCCTTTCTGATGGCCCTGACCGACAGCGGCCCCAAGACAA
ACATCATCGTGGATTCCCAGTACGTGATGGGCATCTCCAAGCCTTCTTTCCAGGAGTTTGTGGACTGG
GAGAACGTGAGCCCAGAGCTGAATTCCACCGATCAGCCATTCTGGCAGGCAGGAATCCTGGCAAGGA
ACCTGGTGCCTATGGTGGCCACAGTGCAGGGCCAGAATCTGAAGTACCAGGGCCAGAGCCTGGTCAT
CAGCGCCTCCATCATCGTGTTTAACCTGCTGGAGCTGGAGGGCGACTATCGGGACGATGGCAACGTGT
GGGTGCACACCCCACTGAGCCCCAGAACACTGAACGCCTGGGTGAAGGCCGTGGAGGAGAAGAAGG
GCATCCCAGTGCACCTGGAGCTGGCCTCCATGACCAATATGGAGCTGATGTCTAGCATCGTGCACCAG
CAGGTGAGGACATACGGACCCGTGTTCATGTGCCTGGGAGGCCTGCTGACCATGGTGGCAGGAGCCG
TGTGGCTGACAGTGCGGGTGCTGGAGCTGTTCAGAGCCGCCCAGCTGGCCAACGATGTGGTGCTGCA
GATCATGGAGCTGTGCGGAGCAGCCTTTCGCCAGGTGTGCCACACCACAGTGCCATGGCCCAATGCCT
CCCTGACCCCCAAGTGGAACAATGAGACAACACAGCCTCAGATCGCCAACTGTAGCGTGTACGACTT
CTTCGTGTGGCTGCACTACTATAGCGTGAGGGATACCCTGTGGCCCCGCGTGACATACCACATGAATA
AGTACGCCTATCACATGCTGGAGAGGCGCGCCAAGTATAAGAGAGGCCCTGGCCCAGGCGCAAAGTT
TGTGGCAGCATGGACCCTGAAGGCCGCCGCCGGCCCCGGCCCCGGCCAGTATATCAAGGCTAACAGT
AAGTTCATTGGAATCACAGAGCTGGGACCCGGACCTGGATAATGAGTTTAAACcgttactggccgaagccgcttgg
aataaggccggtgtgcgtttgtctatatgttattttccaccatattgccgtcttttggcaatgtgagggcccggaaacctggccctgtcttcttgacgagca
ttcctaggggtctttcccctctcgccaaaggaatgcaaggtctgagaatgtcgtgaaggaagcagttcctctggaagcttcttgaagacaaacaacgtctgt
agcgaccctttgcaggcagcggaaccccccacctggcgacaggtgcctctgcggccaaaagccacgtgtataagatacacctgcaaaggcggcacaacccca
gtgccacgttgtgagttggatagttgtggaaagagtcaaatggctctcctcaagcgtattcaacaaggggctgaaggatgcccagaaggtaccccattgtat
gggatctgatctggggcctcggtgcacatgctttacatgtgtttagtcgaggttaaaaaacgtctaggccccccgaaccacggggacgtggttttcctttga
aaaacacgatgataatatgggatggagctggatctttctcttcctcctgtcaggaactgcaGGAGTGCATTCTGAGGCCAAGTTACAGGAGTCTGGACCTGT
GCTGGTTAAACCTGGAGCTTCTGTGAAGATGAGCTGTAAGGCCAGCGGCTACACCTTTACCGACTACTACATGAACTGGGTGAA
GCAGTCTCACGGAAAGTCTCTGGAGTGGATCGGCGTGATCAACCCCTACAATGGCGATACAAGCTAC
AACCAGAAGTTCAAGGGCAAGGCCACCCTGACCGTGGATAAGAGCAGCTCTACAGCCTATATGGAGC
TGAATAGCCTGACAAGCGAGGATTCTGCCGTGTACTACTGCGCCCGGTATTATGGCAGCTGGTTTGCC
TATTGGGGACAAGGAACACTGATTACCGTGTCTACAGCCaaaacaacacccccatcagtctatccactggcccctgggtgtggag
atacaactggacctccgtgactctgggatgcctggtcaagggctacttccctgagtcagtgactgtgacttggaactctggatccctgtccagcagtgtgcac
accttcccagctctcctgcagtctggactctacactatgagcagctcagtgactgtcccctccagcacctggccaagtcagaccgtcacctgcagcgttgctc
acccagccagcagcaccacggtggacaaaaaacttgagcccagcgggcccatttcaacaatcaacccctgtcctccatgcaaggagtgtcacaaatgcccagc
tcctaacctggagggtggaccatccgtcttcatcttccctccaaatatcaaggatgtactcatgatctccctgacacccaaggtcacgtgtgtggtggtggat
gtgagcgaggatgacccagacgtccagatcagctggtttgtgaacaacgtggaagtacacacagctcagacacaaacccatagagaggattacaacagtacta
tccgggtggtcagcaccctccccatccagcaccaggactggatgagtggcaaggagttcaaatgcaaggtcaacaacaaagacctcccatcacccatcgagag
aaccatctcaaaaattaaagggctagtcagagctccacaagtatacatcttgccgccaccagcagagcagagtccaggaaagatgtcagtctcacttgcctgg
tcgtgggcttcaaccctggagacatcagtgtggagtggaccagcaatgggcatacagaggagaactacaaggacaccgcaccagtcctggactctgacggttc
ttacttcatatatagcaagctcaatatgaaaacaagcaagtgggagaaaacagattccttctcatgcaacgtgagacacgagggtctgaaaaattactacctg
aagaagaccatctcccggtctccgggtaaacgcaaacggagaggcgtcagaGCTGAAGGTagaGGcTCTttgCTcACcTGTGGaGATGTgGAagagaaccctg
gacccatgaagttgcctgttaggctgaggtgctgatgttctggattcctgGAGCTAGATGCGATATCGTGATGACCCAGACAACACTGTCTCTGCCTGTGTCT
CTGGGAGATCAGGCCTCTATCAGCTGTAGATCTAGCCAGAGCATTGTGCACTCTAACGGCAACACCTACCTGGAGTGG
TACCTGCAGAAACCAGGACAAAGCCCTAAGCTGCTGATCTACAAAGTGAGCAACCGGTTTAGCGGCG
TGCCCGACAGATTTTCTGGATCTGGCTCTGGCACCGATTTTACACTGAAGATCAGCAGAGTGGAGGCC
GAGGATCTGGGAGTGTACTACTGCTTTCAGGGCTCTCATGTGCCTTACACATTTGGAGGAGGAACCAA
GCTGGAGATCAAGcgggctgatgctgcaccaactgtatccatcttcccaccatccagtgagcagttaacatctggaggtgcctcagtcgtgtgcttcttgaac
aacttctaccccaaagacatcaatgtcaagtggaagattgatggcagtgaacgacaaaatggcgtcctgaacagaggactgatcaggacagcaaagacagcac
ctacagcatgagcagcaccctcacgttgaccaaggacgagtatgaacgacataacagctatacctgtgaggccactcacaagacatcaacttcacccattgtc
aagagcttcaacaggaatgagtgtTGATAGATTTAAATGTGAGGGTTAATGCTTCGAGCAGACATGATAAGATACATTGATGA
GTTTGGACAAACCACAACTAGAATGCAGTGAAAAAAATGCTTTATTTGTGAAATTTGTGATGCTATTG
CTTTATTTGTAACCATTATAAGCTGCAATAAACAAGTTAACAACAACAATTGCATTCATTTTATGTTTC
AGGTTCAGGGGGAGATGTGGGAGGTTTTTTAAAGCAAGTAAAACCTCTACAAATGTGGTAAAATAAC
TATAACGGTCCTAAGGTAGCGAGTGAGTAGTGTTCTGGGGCGGGGGAGGACCTGCATGAGGGCCAGA
ATAACTGAAATCTGTGCTTTTCTGTGTGTTGCAGCAGCATGAGCGGAAGCGGCTCCTTTGAGGGAGGG
GTATTCAGCCCTTATCTGACGGGGCGTCTCCCCTCCTGGGCGGGAGTGCGTCAGAATGTGATGGGATC
CACGGTGGACGGCCGGCCCGTGCAGCCCGCGAACTCTTCAACCCTGACCTATGCAACCCTGAGCTCTT
CGTCGTTGGACGCAGCTGCCGCCGCAGCTGCTGCATCTGCCGCCAGCGCCGTGCGCGGAATGGCCATG
GGCGCCGGCTACTACGGCACTCTGGTGGCCAACTCGAGTTCCACCAATAATCCCGCCAGCCTGAACGA
GGAGAAGCTGTTGCTGCTGATGGCCCAGCTCGAGGCCTTGACCCAGCGCCTGGGCGAGCTGACCCAG
CAGGTGGCTCAGCTGCAGGAGCAGACGCGGGCCGCGGTTGCCACGGTGAAATCCAAATAAAAAATGA
ATCAATAAATAAACGGAGACGGTTGTTGATTTTAACACAGAGTCTGAATCTTTATTTGATTTTTCGCGC
GCGGTAGGCCCTGGACCACCGGTCTCGATCATTGAGCACCCGGTGGATCTTTTCCAGGACCCGGTAGA
GGTGGGCTTGGATGTTGAGGTACATGGGCATGAGCCCGTCCCGGGGGTGGAGGTAGCTCCATTGCAG
GGCCTCGTGCTCGGGGGTGGTGTTGTAAATCACCCAGTCATAGCAGGGGCGCAGGGCATGGTGTTGC
ACAATATCTTTGAGGAGGAGACTGATGGCCACGGGCAGCCCTTTGGTGTAGGTGTTTACAAATCTGTT
GAGCTGGGAGGGATGCATGCGGGGGGAGATGAGGTGCATCTTGGCCTGGATCTTGAGATTGGCGATG
TTACCGCCCAGATCCCGCCTGGGGTTCATGTTGTGCAGGACCACCAGCACGGTGTATCCGGTGCACTT
GGGGAATTTATCATGCAACTTGGAAGGGAAGGCGTGAAAGAATTTGGCGACGCCTTTGTGCCCGCCC
AGGTTTTCCATGCACTCATCCATGATGATGGCGATGGGCCCGTGGGCGGCGGCCTGGGCAAAGACGTT
TCGGGGGTCGGACACATCATAGTTGTGGTCCTGGGTGAGGTCATCATAGGCCATTTTAATGAATTTGG
GGCGGAGGGTGCCGGACTGGGGGACAAAGGTtCCCTCGATCCCGGGGGCGTAGTTCCCCTCACAGATC
TGCATCTCCCAGGCTTTGAGCTCGGAGGGGGGGATCATGTCCACCTGCGGGGCGATAAAGAACACGG
TTTCCGGGGCGGGGGAGATGAGCTGGGCCGAAAGCAAGTTCCGGAGCAGCTGGGACTTGCCGCAGCC
GGTGGGGCCGTAGATGACCCCGATGACCGGCTGCAGGTGGTAGTTGAGGGAGAGACAGCTGCCGTCC
TCCCGGAGGAGGGGGGCCACCTCGTTCATCATCTCGCGCACGTGCATGTTCTCGCGCACCAGTTCCGC
CAGGAGGCGCTCTCCCCCCAGGGATAGGAGCTCCTGGAGCGAGGCGAAGTTTTTCAGCGGCTTGAGT
CCGTCGGCCATGGGCATTTTGGAGAGGGTTTGTTGCAAGAGTTCCAGGCGGTCCCAGAGCTCGGTGAT
GTGCTCTACGGCATCTCGATCCAGCAGACCTCCTCGTTTCGCGGGTTGGGACGGCTGCGGGAGTAGGG
CACCAGACGATGGGCGTCCAGCGCAGCCAGGGTCCGGTCCTTCCAGGGTCGCAGCGTCCGCGTCAGG
GTGGTCTCCGTCACGGTGAAGGGGTGCGCGCCGGGCTGGGCGCTTGCGAGGGTGCGCTTCAGGCTCA
TCCGGCTGGTCGAAAACCGCTCCCGATCGGCGCCCTGCGCGTCGGCCAGGTAGCAATTGACCATGAGT
TCGTAGTTGAGCGCCTCGGCCGCGTGGCCTTTGGCGCGGAGCTTACCTTTGGAAGTCTGCCCGCAGGC
GGGACAGAGGAGGGACTTGAGGGCGTAGAGCTTGGGGGCGAGGAAGACGGACTCGGGGGCGTAGGC
GTCCGCGCCGCAGTGGGCGCAGACGGTCTCGCACTCCACGAGCCAGGTGAGGTCGGGCTGGTCGGGG
TCAAAAACCAGTTTCCCGCCGTTCTTTTTGATGCGTTTCTTACCTTTGGTCTCCATGAGCTCGTGTCCCC
GCTGGGTGACAAAGAGGCTGTCCGTGTCCCCGTAGACCGACTTTATGGGCCGGTCCTCGAGCGGTGTG
CCGCGGTCCTCCTCGTAGAGGAACCCCGCCCACTCCGAGACGAAAGCCCGGGTCCAGGCCAGCACGA
AGGAGGCCACGTGGGACGGGTAGCGGTCGTTGTCCACCAGCGGGTCCACCTTTTCCAGGGTATGCAA
ACACATGTCCCCCTCGTCCACATCCAGGAAGGTGATTGGCTTGTAAGTGTAGGCCACGTGACCGGGGG
TCCCGGCCGGGGGGGTATAAAAGGGTGCGGGTCCCTGCTCGTCCTCACTGTCTTCCGGATCGCTGTCC
AGGAGCGCCAGCTGTTGGGGTAGGTATTCCCTCTCGAAGGCGGGCATGACCTCGGCACTCAGGTTGTC
AGTTTCTAGAAACGAGGAGGATTTGATATTGACGGTGCCGGCGGAGATGCCTTTCAAGAGCCCCTCGT
CCATCTGGTCAGAAAAGACGATCTTTTTGTTGTCGAGCTTGGTGGCGAAGGAGCCGTAGAGGGCGTTG
GAGAGGAGCTTGGCGATGGAGCGCATGGTCTGGTTTTTTTCCTTGTCGGCGCGCTCCTTGGCGGCGAT
GTTGAGCTGCACGTACTCGCGCGCCACGCACTTCCATTCGGGGAAGACGGTGGTCAGCTCGTCGGGCA
CGATTCTGACCTGCCAGCCCCGATTATGCAGGGTGATGAGGTCCACACTGGTGGCCACCTCGCCGCGC
AGGGGCTCATTAGTCCAGCAGAGGCGTCCGCCCTTGCGCGAGCAGAAGGGGGGCAGGGGGTCCAGCA
TGACCTCGTCGGGGGGGTCGGCATCGATGGTGAAGATGCCGGGCAGGAGGTCGGGGTCAAAGTAGCT
GATGGAAGTGGCCAGATCGTCCAGGGCAGCTTGCCATTCGCGCACGGCCAGCGCGCGCTCGTAGGGA
CTGAGGGGCGTGCCCCAGGGCATGGGATGGGTAAGCGCGGAGGCGTACATGCCGCAGATGTCGTAGA
CGTAGAGGGGCTCCTCGAGGATGCCGATGTAGGTGGGGTAGCAGCGCCCCCCGCGGATGCTGGCGCG
CACGTAGTCATACAGCTCGTGCGAGGGGGCGAGGAGCCCCGGGCCCAGGTTGGTGCGACTGGGCTTT
TCGGCGCGGTAGACGATCTGGCGGAAAATGGCATGCGAGTTGGAGGAGATGGTGGGCCTTTGGAAGA
TGTTGAAGTGGGCGTGGGGCAGTCCGACCGAGTCGCGGATGAAGTGGGCGTAGGAGTCTTGCAGCTT
GGCGACGAGCTCGGCGGTGACTAGGACGTCCAGAGCGCAGTAGTCGAGGGTCTCCTGGATGATGTCA
TACTTGAGCTGTCCCTTTTGTTTCCACAGCTCGCGGTTGAGAAGGAACTCTTCGCGGTCCTTCCAGTAC
TCTTCGAGGGGGAACCCGTCCTGATCTGCACGGTAAGAGCCTAGCATGTAGAACTGGTTGACGGCCTT
GTAGGCGCAGCAGCCCTTCTCCACGGGGAGGGCGTAGGCCTGGGCGGCCTTGCGCAGGGAGGTGTGC
GTGAGGGCGAAAGTGTCCCTGACCATGACCTTGAGGAACTGGTGCTTGAAGTCGATATCGTCGCAGC
CCCCCTGCTCCCAGAGCTGGAAGTCCGTGCGCTTCTTGTAGGCGGGGTTGGGCAAAGCGAAAGTAAC
ATCGTTGAAGAGGATCTTGCCCGCGCGGGGCATAAAGTTGCGAGTGATGCGGAAAGGTTGGGGCACC
TCGGCCCGGTTGTTGATGACCTGGGCGGCGAGCACGATCTCGTCGAAGCCGTTGATGTTGTGGCCCAC
GATGTAGAGTTCCACGAATCGCGGACGGCCCTTGACGTGGGGCAGTTTCTTGAGCTCCTCGTAGGTGA
GCTCGTCGGGGTCGCTGAGCCCGTGCTGCTCGAGCGCCCAGTCGGCGAGATGGGGGTTGGCGCGGAG
GAAGGAAGTCCAGAGATCCACGGCCAGGGCGGTTTGCAGACGGTCCCGGTACTGACGGAACTGCTGC
CCGACGGCCATTTTTTCGGGGGTGACGCAGTAGAAGGTGCGGGGGTCCCCGTGCCAGCGATCCCATTT
GAGCTGGAGGGCGAGATCGAGGGCGAGCTCGACGAGCCGGTCGTCCCCGGAGAGTTTCATGACCAGC
ATGAAGGGGACGAGCTGCTTGCCGAAGGACCCCATCCAGGTGTAGGTTTCCACATCGTAGGTGAGGA
AGAGCCTTTCGGTGCGAGGATGCGAGCCGATGGGGAAGAACTGGATCTCCTGCCACCAATTGGAGGA
ATGGCTGTTGATGTGATGGAAGTAGAAATGCCGACGGCGCGCCGAACACTCGTGCTTGTGTTTATACA
AGCGGCCACAGTGCTCGCAACGCTGCACGGGATGCACGTGCTGCACGAGCTGTACCTGAGTTCCTTTG
ACGAGGAATTTCAGTGGGAAGTGGAGTCGTGGCGCCTGCATCTCGTGCTGTACTACGTCGTGGTGGTC
GGCCTGGCCCTCTTCTGCCTCGATGGTGGTCATGCTGACGAGCCCGCGCGGGAGGCAGGTCCAGACCT
CGGCGCGAGCGGGTCGGAGAGCGAGGACGAGGGCGCGCAGGCCGGAGCTGTCCAGGGTCCTGAGAC
GCTGCGGAGTCAGGTCAGTGGGCAGCGGCGGCGCGCGGTTGACTTGCAGGAGTTTTTCCAGGGCGCG
CGGGAGGTCCAGATGGTACTTGATCTCCACCGCGCCATTGGTGGCGACGTCGATGGCTTGCAGGGTCC
CGTGCCCCTGGGGTGTGACCACCGTCCCCCGTTTCTTCTTGGGCGGCTGGGGCGACGGGGGCGGTGCC
TCTTCCATGGTTAGAAGCGGCGGCGAGGACGCGCGCCGGGCGGCAGGGGCGGCTCGGGGCCCGGAG
GCAGGGGCGGCAGGGGCACGTCGGCGCCGCGCGCGGGTAGGTTCTGGTACTGCGCCCGGAGAAGACT
GGCGTGAGCGACGACGCGACGGTTGACGTCCTGGATCTGACGCCTCTGGGTGAAGGCCACGGGACCC
GTGAGTTTGAACCTGAAAGAGAGTTCGACAGAATCAATCTCGGTATCGTTGACGGCGGCCTGCCGCA
GGATCTCTTGCACGTCGCCCGAGTTGTCCTGGTAGGCGATCTCGGTCATGAACTGCTCGATCTCCTCCT
CTTGAAGGTCTCCGCGGCCGGCGCGCTCCACGGTGGCCGCGAGGTCGTTGGAGATGCGGCCCATGAG
CTGCGAGAAGGCGTTCATGCCCGCCTCGTTCCAGACGCGGCTGTAGACCACGACGCCCTCGGGATCGC
gGGCGCGCATGACCACCTGGGCGAGGTTGAGCTCCACGTGGCGCGTGAAGACCGCGTAGTTGCAGAG
GCGCTGGTAGAGGTAGTTGAGCGTGGTGGCGATGTGCTCGGTGACGAAGAAATACATGATCCAGCGG
CGGAGCGGCATCTCGCTGACGTCGCCCAGCGCCTCCAAACGTTCCATGGCCTCGTAAAAGTCCACGGC
GAAGTTGAAAAACTGGGAGTTGCGCGCCGAGACGGTCAACTCCTCCTCCAGAAGACGGATGAGCTCG
GCGATGGTGGCGCGCACCTCGCGCTCGAAGGCCCCCGGGAGTTCCTCCACTTCCTCTTCTTCCTCCTCC
ACTAACATCTCTTCTACTTCCTCCTCAGGCGGCAGTGGTGGCGGGGGAGGGGGCCTGCGTCGCCGGCG
GCGCACGGGCAGACGGTCGATGAAGCGCTCGATGGTCTCGCCGCGCCGGCGTCGCATGGTCTCGGTG
ACGGCGCGCCCGTCCTCGCGGGGCCGCAGCGTGAAGACGCCGCCGCGCATCTCCAGGTGGCCGGGGG
GGTCCCCGTTGGGCAGGGAGAGGGCGCTGACGATGCATCTTATCAATTGCCCCGTAGGGACTCCGCG
CAAGGACCTGAGCGTCTCGAGATCCACGGGATCTGAAAACCGCTGAACGAAGGCTTCGAGCCAGTCG
CAGTCGCAAGGTAGGCTGAGCACGGTTTCTTCTGGCGGGTCATGTTGGTTGGGAGCGGGGCGGGCGA
TGCTGCTGGTGATGAAGTTGAAATAGGCGGTTCTGAGACGGCGGATGGTGGCGAGGAGCACCAGGTC
TTTGGGCCCGGCTTGCTGGATGCGCAGACGGTCGGCCATGCCCCAGGCGTGGTCCTGACACCTGGCCA
GGTCCTTGTAGTAGTCCTGCATGAGCCGCTCCACGGGCACCTCCTCCTCGCCCGCGCGGCCGTGCATG
CGCGTGAGCCCGAAGCCGCGCTGGGGCTGGACGAGCGCCAGGTCGGCGACGACGCGCTCGGCGAGG
ATGGCTTGCTGGATCTGGGTGAGGGTGGTCTGGAAGTCATCAAAGTCGACGAAGCGGTGGTAGGCTC
CGGTGTTGATGGTGTAGGAGCAGTTGGCCATGACGGACCAGTTGACGGTCTGGTGGCCCGGACGCAC
GAGCTCGTGGTACTTGAGGCGCGAGTAGGCGCGCGTGTCGAAGATGTAGTCGTTGCAGGTGCGCACC
AGGTACTGGTAGCCGATGAGGAAGTGCGGCGGCGGCTGGCGGTAGAGCGGCCATCGCTCGGTGGCGG
GGGCGCCGGGCGCGAGGTCCTCGAGCATGGTGCGGTGGTAGCCGTAGATGTACCTGGACATCCAGGT
GATGCCGGCGGCGGTGGTGGAGGCGCGCGGGAACTCGCGGACGCGGTTCCAGATGTTGCGCAGCGGC
AGGAAGTAGTTCATGGTGGGCACGGTCTGGCCCGTGAGGCGCGCGCAGTCGTGGATGCTCTATACGG
GCAAAAACGAAAGCGGTCAGCGGCTCGACTCCGTGGCCTGGAGGCTAAGCGAACGGGTTGGGCTGCG
CGTGTACCCCGGTTCGAATCTCGAATCAGGCTGGAGCCGCAGCTAACGTGGTATTGGCACTCCCGTCT
CGACCCAAGCCTGCACCAACCCTCCAGGATACGGAGGCGGGTCGTTTTGCAACTTTTTTTTGGAGGCC
GGATGAGACTAGTAAGCGCGGAAAGCGGCCGACCGCGATGGCTCGCTGCCGTAGTCTGGAGAAGAAT
CGCCAGGGTTGCGTTGCGGTGTGCCCCGGTTCGAGGCCGGCCGGATTCCGCGGCTAACGAGGGCGTG
GCTGCCCCGTCGTTTCCAAGACCCCATAGCCAGCCGACTTCTCCAGTTACGGAGCGAGCCCCTCTTTT
GTTTTGTTTGTTTTTGCCAGATGCATCCCGTACTGCGGCAGATGCGCCCCCACCACCCTCCACCGCAAC
AACAGCCCCCTCCACAGCCGGCGCTTCTGCCCCCGCCCCAGCAGCAACTTCCAGCCACGACCGCCGCG
GCCGCCGTGAGCGGGGCTGGACAGAGTTATGATCACCAGCTGGCCTTGGAAGAGGGCGAGGGGCTGG
CGCGCCTGGGGGCGTCGTCGCCGGAGCGGCACCCGCGCGTGCAGATGAAAAGGGACGCTCGCGAGGC
CTACGTGCCCAAGCAGAACCTGTTCAGAGACAGGAGCGGCGAGGAGCCCGAGGAGATGCGCGCGGC
CCGGTTCCACGCGGGGCGGGAGCTGCGGCGCGGCCTGGACCGAAAGAGGGTGCTGAGGGACGAGGA
TTTCGAGGCGGACGAGCTGACGGGGATCAGCCCCGCGCGCGCGCACGTGGCCGCGGCCAACCTGGTC
ACGGCGTACGAGCAGACCGTGAAGGAGGAGAGCAACTTCCAAAAATCCTTCAACAACCACGTGCGCA
CCCTGATCGCGCGCGAGGAGGTGACCCTGGGCCTGATGCACCTGTGGGACCTGCTGGAGGCCATCGT
GCAGAACCCCACCAGCAAGCCGCTGACGGCGCAGCTGTTCCTGGTGGTGCAGCATAGTCGGGACAAC
GAAGCGTTCAGGGAGGCGCTGCTGAATATCACCGAGCCCGAGGGCCGCTGGCTCCTGGACCTGGTGA
ACATTCTGCAGAGCATCGTGGTGCAGGAGCGCGGGCTGCCGCTGTCCGAGAAGCTGGCGGCCATCAA
CTTCTCGGTGCTGAGTTTGGGCAAGTACTACGCTAGGAAGATCTACAAGACCCCGTACGTGCCCATAG
ACAAGGAGGTGAAGATCGACGGGTTTTACATGCGCATGACCCTGAAAGTGCTGACCCTGAGCGACGA
TCTGGGGGTGTACCGCAACGACAGGATGCACCGTGCGGTGAGCGCCAGCAGGCGGCGCGAGCTGAGC
GACCAGGAGCTGATGCATAGTCTGCAGCGGGCCCTGACCGGGGCCGGGACCGAGGGGGAGAGCTACT
TTGACATGGGCGCGGACCTGCACTGGCAGCCCAGCCGCCGGGCCTTGGAGGCGGCGGCAGGACCCTA
CGTAGAAGAGGTGGACGATGAGGTGGACGAGGAGGGCGAGTACCTGGAAGACTGATGGCGCGACCG
TATTTTTGCTAGATGCAACAACAACAGCCACCTCCTGATCCCGCGATGCGGGCGGCGCTGCAGAGCCA
GCCGTCCGGCATTAACTCCTCGGACGATTGGACCCAGGCCATGCAACGCATCATGGCGCTGACGACCC
GCAACCCCGAAGCCTTTAGACAGCAGCCCCAGGCCAACCGGCTCTCGGCCATCCTGGAGGCCGTGGT
GCCCTCGCGCTCCAACCCCACGCACGAGAAGGTCCTGGCCATCGTGAACGCGCTGGTGGAGAACAAG
GCCATCCGCGGCGACGAGGCCGGCCTGGTGTACAACGCGCTGCTGGAGCGCGTGGCCCGCTACAACA
GCACCAACGTGCAGACCAACCTGGACCGCATGGTGACCGACGTGCGCGAGGCCGTGGCCCAGCGCGA
GCGGTTCCACCGCGAGTCCAACCTGGGATCCATGGTGGCGCTGAACGCCTTCCTCAGCACCCAGCCCG
CCAACGTGCCCCGGGGCCAGGAGGACTACACCAACTTCATCAGCGCCCTGCGCCTGATGGTGACCGA
GGTGCCCCAGAGCGAGGTGTACCAGTCCGGGCCGGACTACTTCTTCCAGACCAGTCGCCAGGGCTTGC
AGACCGTGAACCTGAGCCAGGCTTTCAAGAACTTGCAGGGCCTGTGGGGCGTGCAGGCCCCGGTCGG
GGACCGCGCGACGGTGTCGAGCCTGCTGACGCCGAACTCGCGCCTGCTGCTGCTGCTGGTGGCCCCCT
TCACGGACAGCGGCAGCATCAACCGCAACTCGTACCTGGGCTACCTGATTAACCTGTACCGCGAGGC
CATCGGCCAGGCGCACGTGGACGAGCAGACCTACCAGGAGATCACCCACGTGAGCCGCGCCCTGGGC
CAGGACGACCCGGGCAACCTGGAAGCCACCCTGAACTTTTTGCTGACCAACCGGTCGCAGAAGATCC
CGCCCCAGTACGCGCTCAGCACCGAGGAGGAGCGCATCCTGCGTTACGTGCAGCAGAGCGTGGGCCT
GTTCCTGATGCAGGAGGGGGCCACCCCCAGCGCCGCGCTCGACATGACCGCGCGCAACATGGAGCCC
AGCATGTACGCCAGCAACCGCCCGTTCATCAATAAACTGATGGACTACTTGCATCGGGCGGCCGCCAT
GAACTCTGACTATTTCACCAACGCCATCCTGAATCCCCACTGGCTCCCGCCGCCGGGGTTCTACACGG
GCGAGTACGACATGCCCGACCCCAATGACGGGTTCCTGTGGGACGATGTGGACAGCAGCGTGTTCTC
CCCCCGACCGGGTGCTAACGAGCGCCCCTTGTGGAAGAAGGAAGGCAGCGACCGACGCCCGTCCTCG
GCGCTGTCCGGCCGCGAGGGTGCTGCCGCGGCGGTGCCCGAGGCCGCCAGTCCTTTCCCGAGCTTGCC
CTTCTCGCTGAACAGTATCCGCAGCAGCGAGCTGGGCAGGATCACGCGCCCGCGCTTGCTGGGCGAA
GAGGAGTACTTGAATGACTCGCTGTTGAGACCCGAGCGGGAGAAGAACTTCCCCAATAACGGGATAG
AAAGCCTGGTGGACAAGATGAGCCGCTGGAAGACGTATGCGCAGGAGCACAGGGACGATCCCCGGG
CGTCGCAGGGGGCCACGAGCCGGGGCAGCGCCGCCCGTAAACGCCGGTGGCACGACAGGCAGCGGG
GACAGATGTGGGACGATGAGGACTCCGCCGACGACAGCAGCGTGTTGGACTTGGGTGGGAGTGGTAA
CCCGTTCGCTCACCTGCGCCCCCGTATCGGGCGCATGATGTAAGAGAAACCGAAAATAAATGATACTC
ACCAAGGCCATGGCGACCAGCGTGCGTTCGTTTCTTCTCTGTTGTTGTTGTATCTAGTATGATGAGGCG
TGCGTACCCGGAGGGTCCTCCTCCCTCGTACGAGAGCGTGATGCAGCAGGCGATGGCGGCGGCGGCG
ATGCAGCCCCCGCTGGAGGCTCCTTACGTGCCCCCGCGGTACCTGGCGCCTACGGAGGGGCGGAACA
GCATTCGTTACTCGGAGCTGGCACCCTTGTACGATACCACCCGGTTGTACCTGGTGGACAACAAGTCG
GCGGACATCGCCTCGCTGAACTACCAGAACGACCACAGCAACTTCCTGACCACCGTGGTGCAGAACA
ATGACTTCACCCCCACGGAGGCCAGCACCCAGACCATCAACTTTGACGAGCGCTCGCGGTGGGGCGG
CCAGCTGAAAACCATCATGCACACCAACATGCCCAACGTGAACGAGTTCATGTACAGCAACAAGTTC
AAGGCGCGGGTGATGGTCTCCCGCAAGACCCCCAATGGGGTGACAGTGACAGAGGATTATGATGGTA
GTCAGGATGAGCTGAAGTATGAATGGGTGGAATTTGAGCTGCCCGAAGGCAACTTCTCGGTGACCAT
GACCATCGACCTGATGAACAACGCCATCATCGACAATTACTTGGCGGTGGGGCGGCAGAACGGGGTG
CTGGAGAGCGACATCGGCGTGAAGTTCGACACTAGGAACTTCAGGCTGGGCTGGGACCCCGTGACCG
AGCTGGTCATGCCCGGGGTGTACACCAACGAGGCTTTCCATCCCGATATTGTCTTGCTGCCCGGCTGC
GGGGTGGACTTCACCGAGAGCCGCCTCAGCAACCTGCTGGGCATTCGCAAGAGGCAGCCCTTCCAGG
AAGGCTTCCAGATCATGTACGAGGATCTGGAGGGGGGCAACATCCCCGCGCTCCTGGATGTCGACGC
CTATGAGAAAAGCAAGGAGGATGCAGCAGCTGAAGCAACTGCAGCCGTAGCTACCGCCTCTACCGAG
GTCAGGGGCGATAATTTTGCAAGCGCCGCAGCAGTGGCAGCGGCCGAGGCGGCTGAAACCGAAAGTA
AGATAGTCATTCAGCCGGTGGAGAAGGATAGCAAGAACAGGAGCTACAACGTACTACCGGACAAGA
TAAACACCGCCTACCGCAGCTGGTACCTAGCCTACAACTATGGCGACCCCGAGAAGGGCGTGCGCTC
CTGGACGCTGCTCACCACCTCGGACGTCACCTGCGGCGTGGAGCAAGTCTACTGGTCGCTGCCCGACA
TGATGCAAGACCCGGTCACCTTCCGCTCCACGCGTCAAGTTAGCAACTACCCGGTGGTGGGCGCCGAG
CTCCTGCCCGTCTACTCCAAGAGCTTCTTCAACGAGCAGGCCGTCTACTCGCAGCAGCTGCGCGCCTT
CACCTCGCTTACGCACGTCTTCAACCGCTTCCCCGAGAACCAGATCCTCGTCCGCCCGCCCGCGCCCA
CCATTACCACCGTCAGTGAAAACGTTCCTGCTCTCACAGATCACGGGACCCTGCCGCTGCGCAGCAGT
ATCCGGGGAGTCCAGCGCGTGACCGTTACTGACGCCAGACGCCGCACCTGCCCCTACGTCTACAAGG
CCCTGGGCATAGTCGCGCCGCGCGTCCTCTCGAGCCGCACCTTCTAAATGTCCATTCTCATCTCGCCCA
GTAATAACACCGGTTGGGGCCTGCGCGCGCCCAGCAAGATGTACGGAGGCGCTCGCCAACGCTCCAC
GCAACACCCCGTGCGCGTGCGCGGGCACTTCCGCGCTCCCTGGGGCGCCCTCAAGGGCCGCGTGCGG
TCGCGCACCACCGTCGACGACGTGATCGACCAGGTGGTGGCCGACGCGCGCAACTACACCCCCGCCG
CCGCGCCCGTCTCCACCGTGGACGCCGTCATCGACAGCGTGGTGGCcGACGCGCGCCGGTACGCCCGC
GCCAAGAGCCGGCGGCGGCGCATCGCCCGGCGGCACCGGAGCACCCCCGCCATGCGCGCGGCGCGA
GCCTTGCTGCGCAGGGCCAGGCGCACGGGACGCAGGGCCATGCTCAGGGCGGCCAGACGCGCGGCTT
CAGGCGCCAGCGCCGGCAGGACCCGGAGACGCGCGGCCACGGCGGCGGCAGCGGCCATCGCCAGCA
TGTCCCGCCCGCGGCGAGGGAACGTGTACTGGGTGCGCGACGCCGCCACCGGTGTGCGCGTGCCCGT
GCGCACCCGCCCCCCTCGCACTTGAAGATGTTCACTTCGCGATGTTGATGTGTCCCAGCGGCGAGGAG
GATGTCCAAGCGCAAATTCAAGGAAGAGATGCTCCAGGTCATCGCGCCTGAGATCTACGGCCCTGCG
GTGGTGAAGGAGGAAAGAAAGCCCCGCAAAATCAAGCGGGTCAAAAAGGACAAAAAGGAAGAAGA
AAGTGATGTGGACGGATTGGTGGAGTTTGTGCGCGAGTTCGCCCCCCGGCGGCGCGTGCAGTGGCGC
GGGCGGAAGGTGCAACCGGTGCTGAGACCCGGCACCACCGTGGTCTTCACGCCCGGCGAGCGCTCCG
GCACCGCTTCCAAGCGCTCCTACGACGAGGTGTACGGGGATGATGATATTCTGGAGCAGGCGGCCGA
GCGCCTGGGCGAGTTTGCTTACGGCAAGCGCAGCCGTTCCGCACCGAAGGAAGAGGCGGTGTCCATC
CCGCTGGACCACGGCAACCCCACGCCGAGCCTCAAGCCCGTGACCTTGCAGCAGGTGCTGCCGACCG
CGGCGCCGCGCCGGGGGTTCAAGCGCGAGGGCGAGGATCTGTACCCCACCATGCAGCTGATGGTGCC
CAAGCGCCAGAAGCTGGAAGACGTGCTGGAGACCATGAAGGTGGACCCGGACGTGCAGCCCGAGGT
CAAGGTGCGGCCCATCAAGCAGGTGGCCCCGGGCCTGGGCGTGCAGACCGTGGACATCAAGATTCCC
ACGGAGCCCATGGAAACGCAGACCGAGCCCATGATCAAGCCCAGCACCAGCACCATGGAGGTGCAG
ACGGATCCCTGGATGCCATCGGCTCCTAGTCGAAGACCCCGGCGCAAGTACGGCGCGGCCAGCCTGC
TGATGCCCAACTACGCGCTGCATCCTTCCATCATCCCCACGCCGGGCTACCGCGGCACGCGCTTCTAC
CGCGGTCATACCAGCAGCCGCCGCCGCAAGACCACCACTCGCCGCCGCCGTCGCCGCACCGCCGCTG
CAACCACCCCTGCCGCCCTGGTGCGGAGAGTGTACCGCCGCGGCCGCGCACCTCTGACCCTGCCGCGC
GCGCGCTACCACCCGAGCATCGCCATTTAAACTTTCGCCtGCTTTGCAGATCAATGGCCCTCACATGCC
GCCTTCGCGTTCCCATTACGGGCTACCGAGGAAGAAAACCGCGCCGTAGAAGGCTGGCGGGGAACGG
GATGCGTCGCCACCACCACCGGCGGCGGCGCGCCATCAGCAAGCGGTTGGGGGGAGGCTTCCTGCCC
GCGCTGATCCCCATCATCGCCGCGGCGATCGGGGCGATCCCCGGCATTGCTTCCGTGGCGGTGCAGGC
CTCTCAGCGCCACTGAGACACACTTGGAAACATCTTGTAATAAACCaATGGACTCTGACGCTCCTGGT
CCTGTGATGTGTTTTCGTAGACAGATGGAAGACATCAATTTTTCGTCCCTGGCTCCGCGACACGGCAC
GCGGCCGTTCATGGGCACCTGGAGCGACATCGGCACCAGCCAACTGAACGGGGGCGCCTTCAATTGG
AGCAGTCTCTGGAGCGGGCTTAAGAATTTCGGGTCCACGCTTAAAACCTATGGCAGCAAGGCGTGGA
ACAGCACCACAGGGCAGGCGCTGAGGGATAAGCTGAAAGAGCAGAACTTCCAGCAGAAGGTGGTCG
ATGGGCTCGCCTCGGGCATCAACGGGGTGGTGGACCTGGCCAACCAGGCCGTGCAGCGGCAGATCAA
CAGCCGCCTGGACCCGGTGCCGCCCGCCGGCTCCGTGGAGATGCCGCAGGTGGAGGAGGAGCTGCCT
CCCCTGGACAAGCGGGGCGAGAAGCGACCCCGCCCCGATGCGGAGGAGACGCTGCTGACGCACACG
GACGAGCCGCCCCCGTACGAGGAGGCGGTGAAACTGGGTCTGCCCACCACGCGGCCCATCGCGCCCC
TGGCCACCGGGGTGCTGAAACCCGAAAAGCCCGCGACCCTGGACTTGCCTCCTCCCCAGCCTTCCCGC
CCCTCTACAGTGGCTAAGCCCCTGCCGCCGGTGGCCGTGGCCCGCGCGCGACCCGGGGGCACCGCCC
GCCCTCATGCGAACTGGCAGAGCACTCTGAACAGCATCGTGGGTCTGGGAGTGCAGAGTGTGAAGCG
CCGCCGCTGCTATTAAACCTACCGTAGCGCTTAACTTGCTTGTCTGTGTGTGTATGTATTATGTCGCCG
CCGCCGCTGTCCACCAGAAGGAGGAGTGAAGAGGCGCGTCGCCGAGTTGCAAGATGGCCACCCCATC
GATGCTGCCCCAGTGGGCGTACATGCACATCGCCGGACAGGACGCTTCGGAGTACCTGAGTCCGGGT
CTGGTGCAGTTTGCCCGCGCCACAGACACCTACTTCAGTCTGGGGAACAAGTTTAGGAACCCCACGGT
GGCGCCCACGCACGATGTGACCACCGACCGCAGCCAGCGGCTGACGCTGCGCTTCGTGCCCGTGGAC
CGCGAGGACAACACCTACTCGTACAAAGTGCGCTACACGCTGGCCGTGGGCGACAACCGCGTGCTGG
ACATGGCCAGCACCTACTTTGACATCCGCGGCGTGCTGGATCGGGGCCCTAGCTTCAAACCCTACTCC
GGCACCGCCTACAACAGTCTGGCCCCCAAGGGAGCACCCAACACTTGTCAGTGGACATATAAAGCCG
ATGGTGAAACTGCCACAGAAAAAACCTATACATATGGAAATGCACCCGTGCAGGGCATTAACATCAC
AAAAGATGGTATTCAACTTGGAACTGACACCGATGATCAGCCAATCTACGCAGATAAAACCTATCAG
CCTGAACCTCAAGTGGGTGATGCTGAATGGCATGACATCACTGGTACTGATGAAAAGTATGGAGGCA
GAGCTCTTAAGCCTGATACCAAAATGAAGCCTTGTTATGGTTCTTTTGCCAAGCCTACTAATAAAGAA
GGAGGTCAGGCAAATGTGAAAACAGGAACAGGCACTACTAAAGAATATGACATAGACATGGCTTTCT
TTGACAACAGAAGTGCGGCTGCTGCTGGCCTAGCTCCAGAAATTGTTTTGTATACTGAAAATGTGGAT
TTGGAAACTCCAGATACCCATATTGTATACAAAGCAGGCACAGATGACAGCAGCTCTTCTATTAATTT
GGGTCAGCAAGCCATGCCCAACAGACCTAACTACATTGGTTTCAGAGACAACTTTATCGGGCTCATGT
ACTACAACAGCACTGGCAATATGGGGGTGCTGGCCGGTCAGGCTTCTCAGCTGAATGCTGTGGTTGAC
TTGCAAGACAGAAACACCGAGCTGTCCTACCAGCTCTTGCTTGACTCTCTGGGTGACAGAACCCGGTA
TTTCAGTATGTGGAATCAGGCGGTGGACAGCTATGATCCTGATGTGCGCATTATTGAAAATCATGGTG
TGGAGGATGAACTTCCCAACTATTGTTTCCCTCTGGATGCTGTTGGCAGAACAGATACTTATCAGGGA
ATTAAGGCTAATGGAACTGATCAAACCACATGGACCAAAGATGACAGTGTCAATGATGCTAATGAGA
TAGGCAAGGGTAATCCATTCGCCATGGAAATCAACATCCAAGCCAACCTGTGGAGGAACTTCCTCTAC
GCCAACGTGGCCCTGTACCTGCCCGACTCTTACAAGTACACGCCGGCCAATGTTACCCTGCCCACCAA
CACCAACACCTACGATTACATGAACGGCCGGGTGGTGGCGCCCTCGCTGGTGGACTCCTACATCAACA
TCGGGGCGCGCTGGTCGCTGGATCCCATGGACAACGTGAACCCCTTCAACCACCACCGCAATGCGGG
GCTGCGCTACCGCTCCATGCTCCTGGGCAACGGGCGCTACGTGCCCTTCCACATCCAGGTGCCCCAGA
AATTTTTCGCCATCAAGAGCCTCCTGCTCCTGCCCGGGTCCTACACCTACGAGTGGAACTTCCGCAAG
GACGTCAACATGATCCTGCAGAGCTCCCTCGGCAACGACCTGCGCACGGACGGGGCCTCCATCTCCTT
CACCAGCATCAACCTCTACGCCACCTTCTTCCCCATGGCGCACAACACGGCCTCCACGCTCGAGGCCA
TGCTGCGCAACGACACCAACGACCAGTCCTTCAACGACTACCTCTCGGCGGCCAACATGCTCTACCCC
ATCCCGGCCAACGCCACCAACGTGCCCATCTCCATCCCCTCGCGCAACTGGGCCGCCTTCCGCGGCTG
GTCCTTCACGCGTCTCAAGACCAAGGAGACGCCCTCGCTGGGCTCCGGGTTCGACCCCTACTTCGTCT
ACTCGGGCTCCATCCCCTACCTCGACGGCACCTTCTACCTCAACCACACCTTCAAGAAGGTCTCCATC
ACCTTCGACTCCTCCGTCAGCTGGCCCGGCAACGACCGGCTCCTGACGCCCAACGAGTTCGAAATCAA
GCGCACCGTCGACGGCGAGGGCTACAACGTGGCCCAGTGCAACATGACCAAGGACTGGTTCCTGGTC
CAGATGCTGGCCCACTACAACATCGGCTACCAGGGCTTCTACGTGCCCGAGGGCTACAAGGACCGCA
TGTACTCCTTCTTCCGCAACTTCCAGCCCATGAGCCGCCAGGTGGTGGACGAGGTCAACTACAAGGAC
TACCAGGCCGTCACCCTGGCCTACCAGCACAACAACTCGGGCTTCGTCGGCTACCTCGCGCCCACCAT
GCGCCAGGGCCAGCCCTACCCCGCCAACTACCCCTACCCGCTCATCGGCAAGAGCGCCGTCACCAGC
GTCACCCAGAAAAAGTTCCTCTGCGACAGGGTCATGTGGCGCATCCCCTTCTCCAGCAACTTCATGTC
CATGGGCGCGCTCACCGACCTCGGCCAGAACATGCTCTATGCCAACTCCGCCCACGCGCTAGACATGA
ATTTCGAAGTCGACCCCATGGATGAGTCCACCCTTCTCTATGTTGTCTTCGAAGTCTTCGACGTCGTCC
GAGTGCACCAGCCCCACCGCGGCGTCATCGAGGCCGTCTACCTGCGCACCCCCTTCTCGGCCGGTAAC
GCCACCACCTAAGCTCTTGCTTCTTGCAAGCCATGGCCGCGGGCTCCGGCGAGCAGGAGCTCAGGGCC
ATCATCCGCGACCTGGGCTGCGGGCCCTACTTCCTGGGCACCTTCGATAAGCGCTTCCCGGGATTCAT
GGCCCCGCACAAGCTGGCCTGCGCCATCGTCAACACGGCCGGCCGCGAGACCGGGGGCGAGCACTGG
CTGGCCTTCGCCTGGAACCCGCGCTCGAACACCTGCTACCTCTTCGACCCCTTCGGGTTCTCGGACGA
GCGCCTCAAGCAGATCTACCAGTTCGAGTACGAGGGCCTGCTGCGCCGCAGCGCCCTGGCCACCGAG
GACCGCTGCGTCACCCTGGAAAAGTCCACCCAGACCGTGCAGGGTCCGCGCTCGGCCGCCTGCGGGC
TCTTCTGCTGCATGTTCCTGCACGCCTTCGTGCACTGGCCCGACCGCCCCATGGACAAGAACCCCACC
ATGAACTTGCTGACGGGGGTGCCCAACGGCATGCTCCAGTCGCCCCAGGTGGAACCCACCCTGCGCC
GCAACCAGGAGGCGCTCTACCGCTTCCTCAACTCCCACTCCGCCTACTTTCGCTCCCACCGCGCGCGC
ATCGAGAAGGCCACCGCCTTCGACCGCATGAATCAAGACATGTAAACCGTGTGTGTATGTTAAATGTC
TTTAATAAACAGCACTTTCATGTTACACATGCATCTGAGATGATTTATTTAGAAATCGAAAGGGTTCT
GCCGGGTCTCGGCATGGCCCGCGGGCAGGGACACGTTGCGGAACTGGTACTTGGCCAGCCACTTGAA
CTCGGGGATCAGCAGTTTGGGCAGCGGGGTGTCGGGGAAGGAGTCGGTCCACAGCTTCCGCGTCAGT
TGCAGGGCGCCCAGCAGGTCGGGCGCGGAGATCTTGAAATCGCAGTTGGGACCCGCGTTCTGCGCGC
GGGAGTTGCGGTACACGGGGTTGCAGCACTGGAACACCATCAGGGCCGGGTGCTTCACGCTCGCCAG
CACCGTCGCGTCGGTGATGCTCTCCACGTCGAGGTCCTCGGCGTTGGCCATCCCGAAGGGGGTCATCT
TGCAGGTCTGCCTTCCCATGGTGGGCACGCACCCGGGCTTGTGGTTGCAATCGCAGTGCAGGGGGATC
AGCATCATCTGGGCCTGGTCGGCGTTCATCCCCGGGTACATGGCCTTCATGAAAGCCTCCAATTGCCT
GAACGCCTGCTGGGCCTTGGCTCCCTCGGTGAAGAAGACCCCGCAGGACTTGCTAGAGAACTGGTTG
GTGGCGCACCCGGCGTCGTGCACGCAGCAGCGCGCGTCGTTGTTGGCCAGCTGCACCACGCTGCGCCC
CCAGCGGTTCTGGGTGATCTTGGCCCGGTCGGGGTTCTCCTTCAGCGCGCGCTGCCCGTTCTCGCTCGC
CACATCCATCTCGATCATGTGCTCCTTCTGGATCATGGTGGTCCCGTGCAGGCACCGCAGCTTGCCCTC
GGCCTCGGTGCACCCGTGCAGCCACAGCGCGCACCCGGTGCACTCCCAGTTCTTGTGGGCGATCTGGG
AATGCGCGTGCACGAAGCCCTGCAGGAAGCGGCCCATCATGGTGGTCAGGGTCTTGTTGCTAGTGAA
GGTCAGCGGAATGCCGCGGTGCTCCTCGTTGATGTACAGGTGGCAGATGCGGCGGTACACCTCGCCCT
GCTCGGGCATCAGCTGGAAGTTGGCTTTCAGGTCGGTCTCCACGCGGTAGCGGTCCATCAGCATAGTC
ATGATTTCCATACCCTTCTCCCAGGCCGAGACGATGGGCAGGCTCATAGGGTTCTTCACCATCATCTT
AGCGCTAGCAGCCGCGGCCAGGGGGTCGCTCTCGTCCAGGGTCTCAAAGCTCCGCTTGCCGTCCTTCT
CGGTGATCCGCACCGGGGGGTAGCTGAAGCCCACGGCCGCCAGCTCCTCCTCGGCCTGTCTTTCGTCC
TCGCTGTCCTGGCTGACGTCCTGCAGGACCACATGCTTGGTCTTGCGGGGTTTCTTCTTGGGCGGCAGC
GGCGGCGGAGATGTTGGAGATGGCGAGGGGGAGCGCGAGTTCTCGCTCACCACTACTATCTCTTCCTC
TTCTTGGTCCGAGGCCACGCGGCGGTAGGTATGTCTCTTCGGGGGCAGAGGCGGAGGCGACGGGCTC
TCGCCGCCGCGACTTGGCGGATGGCTGGCAGAGCCCCTTCCGCGTTCGGGGGTGCGCTCCCGGCGGCG
CTCTGACTGACTTCCTCCGCGGCCGGCCATTGTGTTCTCCTAGGGAGGAACAACAAGCATGGAGACTC
AGCCATCGCCAACCTCGCCATCTGCCCCCACCGCCGACGAGAAGCAGCAGCAGCAGAATGAAAGCTT
AACCGCCCCGCCGCCCAGCCCCGCCACCTCCGACGCGGCCGTCCCAGACATGCAAGAGATGGAGGAA
TCCATCGAGATTGACCTGGGCTATGTGACGCCCGCGGAGCACGAGGAGGAGCTGGCAGTGCGCTTTT
CACAAGAAGAGATACACCAAGAACAGCCAGAGCAGGAAGCAGAGAATGAGCAGAGTCAGGCTGGGC
TCGAGCATGACGGCGACTACCTCCACCTGAGCGGGGGGGAGGACGCGCTCATCAAGCATCTGGCCCG
GCAGGCCACCATCGTCAAGGATGCGCTGCTCGACCGCACCGAGGTGCCCCTCAGCGTGGAGGAGCTC
AGCCGCGCCTACGAGTTGAACCTCTTCTCGCCGCGCGTGCCCCCCAAGCGCCAGCCCAATGGCACCTG
CGAGCCCAACCCGCGCCTCAACTTCTACCCGGTCTTCGCGGTGCCCGAGGCCCTGGCCACCTACCACA
TCTTTTTCAAGAACCAAAAGATCCCCGTCTCCTGCCGCGCCAACCGCACCCGCGCCGACGCCCTTTTC
AACCTGGGTCCCGGCGCCCGCCTACCTGATATCGCCTCCTTGGAAGAGGTTCCCAAGATCTTCGAGGG
TCTGGGCAGCGACGAGACTCGGGCCGCGAACGCTCTGCAAGGAGAAGGAGGAGAGCATGAGCACCA
CAGCGCCCTGGTCGAGTTGGAAGGCGACAACGCGCGGCTGGCGGTGCTCAAACGCACGGTCGAGCTG
ACCCATTTCGCCTACCCGGCTCTGAACCTGCCCCCCAAAGTCATGAGCGCGGTCATGGACCAGGTGCT
CATCAAGCGCGCGTCGCCCATCTCCGAGGACGAGGGCATGCAAGACTCCGAGGAGGGCAAGCCCGTG
GTCAGCGACGAGCAGCTGGCCCGGTGGCTGGGTCCTAATGCTAGTCCCCAGAGTTTGGAAGAGCGGC
GCAAACTCATGATGGCCGTGGTCCTGGTGACCGTGGAGCTGGAGTGCCTGCGCCGCTTCTTCGCCGAC
GCGGAGACCCTGCGCAAGGTCGAGGAGAACCTGCACTACCTCTTCAGGCACGGGTTCGTGCGCCAGG
CCTGCAAGATCTCCAACGTGGAGCTGACCAACCTGGTCTCCTACATGGGCATCTTGCACGAGAACCGC
CTGGGGCAGAACGTGCTGCACACCACCCTGCGCGGGGAGGCCCGGCGCGACTACATCCGCGACTGCG
TCTACCTCTACCTCTGCCACACCTGGCAGACGGGCATGGGCGTGTGGCAGCAGTGTCTGGAGGAGCA
GAACCTGAAAGAGCTCTGCAAGCTCCTGCAGAAGAACCTCAAGGGTCTGTGGACCGGGTTCGACGAG
CGCACCACCGCCTCGGACCTGGCCGACCTCATTTTCCCCGAGCGCCTCAGGCTGACGCTGCGCAACGG
CCTGCCCGACTTTATGAGCCAAAGCATGTTGCAAAACTTTCGCTCTTTCATCCTCGAACGCTCCGGAAT
CCTGCCCGCCACCTGCTCCGCGCTGCCCTCGGACTTCGTGCCGCTGACCTTCCGCGAGTGCCCCCCGCC
GCTGTGGAGCCACTGCTACCTGCTGCGCCTGGCCAACTACCTGGCCTACCACTCGGACGTGATCGAGG
ACGTCAGCGGCGAGGGCCTGCTCGAGTGCCACTGCCGCTGCAACCTCTGCACGCCGCACCGCTCCCTG
GCCTGCAACCCCCAGCTGCTGAGCGAGACCCAGATCATCGGCACCTTCGAGTTGCAAGGGCCCAGCG
AAGGCGAGGGTTCAGCCGCCAAGGGGGGTCTGAAACTCACCCCGGGGCTGTGGACCTCGGCCTACTT
GCGCAAGTTCGTGCCCGAGGACTACCATCCCTTCGAGATCAGGTTCTACGAGGACCAATCCCATCCGC
CCAAGGCCGAGCTGTCGGCCTGCGTCATCACCCAGGGGGCGATCCTGGCCCAATTGCAAGCCATCCA
GAAATCCCGCCAAGAATTCTTGCTGAAAAAGGGCCGCGGGGTCTACCTCGACCCCCAGACCGGTGAG
GAGCTCAACCCCGGCTTCCCCCAGGATGCCCCGAGGAAACAAGAAGCTGAAAGTGGAGCTGCCGCCC
GTGGAGGATTTGGAGGAAGACTGGGAGAACAGCAGTCAGGCAGAGGAGGAGGAGATGGAGGAAGA
CTGGGACAGCACTCAGGCAGAGGAGGACAGCCTGCAAGACAGTCTGGAGGAAGACGAGGAGGAGGC
AGAGGAGGAGGTGGAAGAAGCAGCCGCCGCCAGACCGTCGTCCTCGGCGGGGGAGAAAGCAAGCAG
CACGGATACCATCTCCGCTCCGGGTCGGGGTCCCGCTCGACCACACAGTAGATGGGACGAGACCGGA
CGATTCCCGAACCCCACCACCCAGACCGGTAAGAAGGAGCGGCAGGGATACAAGTCCTGGCGGGGGC
ACAAAAACGCCATCGTCTCCTGCTTGCAGGCCTGCGGGGGCAACATCTCCTTCACCCGGCGCTACCTG
CTCTTCCACCGCGGGGTGAACTTTCCCCGCAACATCTTGCATTACTACCGTCACCTCCACAGCCCCTAC
TACTTCCAAGAAGAGGCAGCAGCAGCAGAAAAAGACCAGCAGAAAACCAGCAGCTAGAAAATCCAC
AGCGGCGGCAGCAGGTGGACTGAGGATCGCGGCGAACGAGCCGGCGCAAACCCGGGAGCTGAGGAA
CCGGATCTTTCCCACCCTCTATGCCATCTTCCAGCAGAGTCGGGGGCAGGAGCAGGAACTGAAAGTCA
AGAACCGTTCTCTGCGCTCGCTCACCCGCAGTTGTCTGTATCACAAGAGCGAAGACCAACTTCAGCGC
ACTCTCGAGGACGCCGAGGCTCTCTTCAACAAGTACTGCGCGCTCACTCTTAAAGAGTAGCCCGCGCC
CGCCCAGTCGCAGAAAAAGGCGGGAATTACGTCACCTGTGCCCTTCGCCCTAGCCGCCTCCACCCATC
ATCATGAGCAAAGAGATTCCCACGCCTTACATGTGGAGCTACCAGCCCCAGATGGGCCTGGCCGCCG
GTGCCGCCCAGGACTACTCCACCCGCATGAATTGGCTCAGCGCCGGGCCCGCGATGATCTCACGGGTG
AATGACATCCGCGCCCACCGAAACCAGATACTCCTAGAACAGTCAGCGCTCACCGCCACGCCCCGCA
ATCACCTCAATCCGCGTAATTGGCCCGCCGCCCTGGTGTACCAGGAAATTCCCCAGCCCACGACCGTA
CTACTTCCGCGAGACGCCCAGGCCGAAGTCCAGCTGACTAACTCAGGTGTCCAGCTGGCGGGCGGCG
CCACCCTGTGTCGTCACCGCCCCGCTCAGGGTATAAAGCGGCTGGTGATCCGGGGCAGAGGCACACA
GCTCAACGACGAGGTGGTGAGCTCTTCGCTGGGTCTGCGACCTGACGGAGTCTTCCAACTCGCCGGAT
CGGGGAGATCTTCCTTCACGCCTCGTCAGGCCGTCCTGACTTTGGAGAGTTCGTCCTCGCAGCCCCGC
TCGGGTGGCATCGGCACTCTCCAGTTCGTGGAGGAGTTCACTCCCTCGGTCTACTTCAACCCCTTCTCC
GGCTCCCCCGGCCACTACCCGGACGAGTTCATCCCGAACTTCGACGCCATCAGCGAGTCGGTGGACG
GCTACGATTGAAACTAATCACCCCCTTATCCAGTGAAATAAAGATCATATTGATGATGATTTTACAGA
AATAAAAAATAATCATTTGATTTGAAATAAAGATACAATCATATTGATGATTTGAGTTTAACAAAAAA
ATAAAGAATCACTTACTTGAAATCTGATACCAGGTCTCTGTCCATGTTTTCTGCCAACACCACTTCACT
CCCCTCTTCCCAGCTCTGGTACTGCAGGCCCCGGCGGGCTGCAAACTTCCTCCACACGCTGAAGGGGA
TGTCAAATTCCTCCTGTCCCTCAATCTTCATTTTATCTTCTATCAGATGTCCAAAAAGCGCGTCCGGGT
GGATGATGACTTCGACCCCGTCTACCCCTACGATGCAGACAACGCACCGACCGTGCCCTTCATCAACC
CCCCCTTCGTCTCTTCAGATGGATTCCAAGAGAAGCCCCTGGGGGTGTTGTCCCTGCGACTGGCCGAC
CCCGTCACCACCAAGAACGGGGAAATCACCCTCAAGCTGGGAGAGGGGGTGGACCTCGATTCCTCGG
GAAAACTCATCTCCAACACGGCCACCAAGGCCGCCGCCCCTCTCAGTTTTTCCAACAACACCATTTCC
CTTAACATGGATCACCCCTTTTACACTAAAGATGGAAAATTATCCTTACAAGTTTCTCCACCATTAAAT
ATACTGAGAACAAGCATTCTAAACACACTAGCTTTAGGTTTTGGATCAGGTTTAGGACTCCGTGGCTC
TGCCTTGGCAGTACAGTTAGTCTCTCCACTTACATTTGATACTGATGGAAACATAAAGCTTACCTTAG
ACAGAGGTTTGCATGTTACAACAGGAGATGCAATTGAAAGCAACATAAGCTGGGCTAAAGGTTTAAA
ATTTGAAGATGGAGCCATAGCAACCAACATTGGAAATGGGTTAGAGTTTGGAAGCAGTAGTACAGAA
ACAGGTGTTGATGATGCTTACCCAATCCAAGTTAAACTTGGATCTGGCCTTAGCTTTGACAGTACAGG
AGCCATAATGGCTGGTAACAAAGAAGACGATAAACTCACTTTGTGGACAACACCTGATCCATCACCA
AACTGTCAAATACTCGCAGAAAATGATGCAAAACTAACACTTTGCTTGACTAAATGTGGTAGTCAAAT
ACTGGCCACTGTGTCAGTCTTAGTTGTAGGAAGTGGAAACCTAAACCCCATTACTGGCACCGTAAGCA
GTGCTCAGGTGTTTCTACGTTTTGATGCAAACGGTGTTCTTTTAACAGAACATTCTACACTAAAAAAAT
ACTGGGGGTATAGGCAGGGAGATAGCATAGATGGCACTCCATATACCAATGCTGTAGGATTCATGCC
CAATTTAAAAGCTTATCCAAAGTCACAAAGTTCTACTACTAAAAATAATATAGTAGGGCAAGTATACA
TGAATGGAGATGTTTCAAAACCTATGCTTCTCACTATAACCCTCAATGGTACTGATGACAGCAACAGT
ACATATTCAATGTCATTTTCATACACCTGGACTAATGGAAGCTATGTTGGAGCAACATTTGGGGCTAA
CTCTTATACCTTCTCATACATCGCCCAAGAATGAACACTGTATCCCACCCTGCATGCCAACCCTTCCCA
CCCCACTCTGTGGAACAAACTCTGAAACACAAAATAAAATAAAGTTCAAGTGTTTTATTGATTCAACA
GTTTTACAGGATTCGAGCAGTTATTTTTCCTCCACCCTCCCAGGACATGGAATACACCACCCTCTCCCC
CCGCACAGCCTTGAACATCTGAATGCCATTGGTGATGGACATGCTTTTGGTCTCCACGTTCCACACAG
TTTCAGAGCGAGCCAGTCTCGGGTCGGTCAGGGAGATGAAACCCTCCGGGCACTCCCGCATCTGCACC
TCACAGCTCAACAGCTGAGGATTGTCCTCGGTGGTCGGGATCACGGTTATCTGGAAGAAGCAGAAGA
GCGGCGGTGGGAATCATAGTCCGCGAACGGGATCGGCCGGTGGTGTCGCATCAGGCCCCGCAGCAGT
CGCTGCCGCCGCCGCTCCGTCAAGCTGCTGCTCAGGGGGTCCGGGTCCAGGGACTCCCTCAGCATGAT
GCCCACGGCCCTCAGCATCAGTCGTCTGGTGCGGCGGGCGCAGCAGCGCATGCGGATCTCGCTCAGG
TCGCTGCAGTACGTGCAACACAGAACCACCAGGTTGTTCAACAGTCCATAGTTCAACACGCTCCAGCC
GAAACTCATCGCGGGAAGGATGCTACCCACGTGGCCGTCGTACCAGATCCTCAGGTAAATCAAGTGG
TGCCCCCTCCAGAACACGCTGCCCACGTACATGATCTCCTTGGGCATGTGGCGGTTCACCACCTCCCG
GTACCACATCACCCTCTGGTTGAACATGCAGCCCCGGATGATCCTGCGGAACCACAGGGCCAGCACC
GCCCCGCCCGCCATGCAGCGAAGAGACCCCGGGTCCCGGCAATGGCAATGGAGGACCCACCGCTCGT
ACCCGTGGATCATCTGGGAGCTGAACAAGTCTATGTTGGCACAGCACAGGCATATGCTCATGCATCTC
TTCAGCACTCTCAACTCCTCGGGGGTCAAAACCATATCCCAGGGCACGGGGAACTCTTGCAGGACAG
CGAACCCCGCAGAACAGGGCAATCCTCGCACAGAACTTACATTGTGCATGGACAGGGTATCGCAATC
AGGCAGCACCGGGTGATCCTCCACCAGAGAAGCGCGGGTCTCGGTCTCCTCACAGCGTGGTAAGGGG
GCCGGCCGATACGGGTGATGGCGGGACGCGGCTGATCGTGTTCGCGACCGTGTCATGATGCAGTTGCT
TTCGGACATTTTCGTACTTGCTGTAGCAGAACCTGGTCCGGGCGCTGCACACCGATCGCCGGCGGCGG
TCTCGGCGCTTGGAACGCTCGGTGTTGAAATTGTAAAACAGCCACTCTCTCAGACCGTGCAGCAGATC
TAGGGCCTCAGGAGTGATGAAGATCCCATCATGCCTGATGGCTCTGATCACATCGACCACCGTGGAAT
GGGCCAGACCCAGCCAGATGATGCAATTTTGTTGGGTTTCGGTGACGGCGGGGGAGGGAAGAACAGG
AAGAACCATGATTAACTTTTAATCCAAACGGTCTCGGAGTACTTCAAAATGAAGATCGCGGAGATGG
CACCTCTCGCCCCCGCTGTGTTGGTGGAAAATAACAGCCAGGTCAAAGGTGATACGGTTCTCGAGATG
TTCCACGGTGGCTTCCAGCAAAGCCTCCACGCGCACATCCAGAAACAAGACAATAGCGAAAGCGGGA
GGGTTCTCTAATTCCTCAATCATCATGTTACACTCCTGCACCATCCCCAGATAATTTTCATTTTTCCAG
CCTTGAATGATTCGAACTAGTTCcTGAGGTAAATCCAAGCCAGCCATGATAAAGAGCTCGCGCAGAGC
GCCCTCCACCGGCATTCTTAAGCACACCCTCATAATTCCAAGATATTCTGCTCCTGGTTCACCTGCAGC
AGATTGACAAGCGGAATATCAAAATCTCTGCCGCGATCCCTGAGCTCCTCCCTCAGCAATAACTGTAA
GTACTCTTTCATATCCTCTCCGAAATTTTTAGCCATAGGACCACCAGGAATAAGATTAGGGCAAGCCA
CAGTACAGATAAACCGAAGTCCTCCCCAGTGAGCATTGCCAAATGCAAGACTGCTATAAGCATGCTG
GCTAGACCCGGTGATATCTTCCAGATAACTGGACAGAAAATCGCCCAGGCAATTTTTAAGAAAATCA
ACAAAAGAAAAATCCTCCAGGTGGACGTTTAGAGCCTCGGGAACAACGATGAAGTAAATGCAAGCG
GTGCGTTCCAGCATGGTTAGTTAGCTGATCTGTAGAAAAAACAAAAATGAACATTAAACCATGCTAG
CCTGGCGAACAGGTGGGTAAATCGTTCTCTCCAGCACCAGGCAGGCCACGGGGTCTCCGGCGCGACC
CTCGTAAAAATTGTCGCTATGATTGAAAACCATCACAGAGAGACGTTCCCGGTGGCCGGCGTGAATG
ATTCGACAAGATGAATACACCCCCGGAACATTGGCGTCCGCGAGTGAAAAAAAGCGCCCGAGGAAGC
AATAAGGCACTACAATGCTCAGTCTCAAGTCCAGCAAAGCGATGCCATGCGGATGAAGCACAAAATT
CTCAGGTGCGTACAAAATGTAATTACTCCCCTCCTGCACAGGCAGCAAAGCCCCCGATCCCTCCAGGT
ACACATACAAAGCCTCAGCGTCCATAGCTTACCGAGCAGCAGCACACAACAGGCGCAAGAGTCAGAG
AAAGGCTGAGCTCTAACCTGTCCACCCGCTCTCTGCTCAATATATAGCCCAGATCTACACTGACGTAA
AGGCCAAAGTCTAAAAATACCCGCCAAATAATCACACACGCCCAGCACACGCCCAGAAACCGGTGAC
ACACTCAAAAAAATACGCGCACTTCCTCAAACGCCCAAAACTGCCGTCATTTCCGGGTTCCCACGCTA
CGTCATCAAAACACGACTTTCAAATTCCGTCGACCGTTAAAAACGTCACCCGCCCCGCCCCTAACGGT
CGCCCGTCTCTCAGCCAATCAGCGCCCCGCATCCCCAAATTCAAACACCTCATTTGCATATTAACGCG
CACAAAAAGTTTGAGGTATATTATTGATGATG
CMV Promoter (SEQ ID NO: 58)
Gacattgattattgactagttgttaatagtaatcaattacggggtcattagttcatagcccatatatggagttccgcgttacataacttacggtaaatggcc
cgcctggctgaccgcccaacgacccccgcccattgacgtcaataatgacgtatgttcccatagtaacgccaatagggactttccattgacgtcaatgggtgg
agtatttacggtaaactgcccacttggcagtacatcaagtgtatcatatgccaagtccgccccctattgacgtcaatgacggtaaatggcccgcctggcatt
atgcccagtacatgaccttacgggactttcctacttggcagtacatctacgtattagtcatcgctattaccatggtgatgcggttttggcagtacaccaatg
ggcgtggatagcggtttgactcacggggatttccaagtctccaccccattgacgtcaatgggagtttgttttggcaccaaaatcaacgggactttccaaaat
gtcgtaataaccccgccccgttgacgcaaatgggcggtaggcgtgtacggtgggaggtctatataagcagagctcgtttagtgaaccgtcagatcgcctgga
acgccatccacgctgttttgacctccatagaagacagcgatcgc
Kozak sequence
gccacc
IRES (SEQ ID NO: 59)
Cgttactggccgaagccgcttggaataaggccggtgtgcgtttgtctatatgttattttccaccatattgccgtcttttggcaatgtgagggcccggaaacc
tggccctgtcttcttgacgagcattcctaggggtctttcccctctcgccaaaggaatgcaaggtctgttgaatgtcgtgaaggaagcagttcctctggaagc
ttcttgaagacaaacaacgtctgtagcgaccctttgcaggcagcggaaccccccacctggcgacaggtgcctctgcggccaaaagccacgtgtataagatac
acctgcaaaggcggcacaaccccagtgccacgttgtgagttggatagttgtggaaagagtcaaatggctctcctcaagcgtattcaacaaggggctgaagga
tgcccagaaggtaccccattgtatgggatctgatctggggcctcggtgcacatgctttacatgtgtttagtcgaggttaaaaaacgtctaggccccccgaac
cacggggacgtggttttcctttgaaaaacacgatgataat
Heavy chain generic leader from NCBI 9D9 clone “g9D9” (SEQ ID NO: 60)
atgggctggtccctgatcctgctgttcctggtggctgtggccacc
Heavy chain original leader predicted from 9D9 parent hybridoma “o9D9” (SEQ ID NO: 61)
atgggatggagctggatctttctcttcctcctgtcaggaactgca
9D9 heavy chain variable region (SEQ ID NO: 62)
GGAGTGCATTCTGAGGCCAAGTTACAGGAGTCTGGACCTGTGCTGGTTAAACCTGGAGCTTCTGTGAA
GATGAGCTGTAAGGCCAGCGGCTACACCTTTACCGACTACTACATGAACTGGGTGAAGCAGTCTCAC
GGAAAGTCTCTGGAGTGGATCGGCGTGATCAACCCCTACAATGGCGATACAAGCTACAACCAGAAGT
TCAAGGGCAAGGCCACCCTGACCGTGGATAAGAGCAGCTCTACAGCCTATATGGAGCTGAATAGCCT
GACAAGCGAGGATTCTGCCGTGTACTACTGCGCCCGGTATTATGGCAGCTGGTTTGCCTATTGGGGAC
AAGGAACACTGATTACCGTGTCTACAGCC
IgG2b Heavy chain Constant Region from Balb/C mice (SEQ ID NO: 63)
aaaacaacacccccatcagtctatccactggcccctgggtgtggagatacaactggttcctccgtgactctgggatgcctggtcaagggctacttccctgagt
cagtgactgtgacttggaactctggatccctgtccagcagtgtgcacaccttcccagctctcctgcagtctggactctacactatgagcagctcagtgactgt
cccctccagcacctggccaagtcagaccgtcacctgcagcgttgctcacccagccagcagcaccacggtggacaaaaaacttgagcccagcgggcccatttca
acaatcaacccctgtcctccatgcaaggagtgtcacaaatgcccagctcctaacctggagggtggaccatccgtcttcatcttccctccaaatatcaaggatg
tactcatgatctccctgacacccaaggtcacgtgtgtggtggtggatgtgagcgaggatgacccagacgtccagatcagctggtttgtgaacaacgtggaagt
acacacagctcagacacaaacccatagagaggattacaacagtactatccgggtggtcagcaccctccccatccagcaccaggactggatgagtggcaaggag
ttcaaatgcaaggtcaacaacaaagacctcccatcacccatcgagagaaccatctcaaaaattaaagggctagtcagagctccacaagtatacatcttgccgc
caccagcagagcagttgtccaggaaagatgtcagtctcacttgcctggtcgtgggcttcaaccctggagacatcagtgtggagtggaccagcaatgggcatac
agaggagaactacaaggacaccgcaccagtcctggactctgacggttcttacttcatatatagcaagctcaatatgaaaacaagcaagtgggagaaaacagat
tccttctcatgcaacgtgagacacgagggtctgaaaaattactacctgaagaagaccatctcccggtctccgggtaaa
Furin Cleavage Site (SEQ ID NO: 64)
cgcaaacggaga
T2A Sequence (SEQ ID NO: 65)
ggcgtcagaGCTGAAGGTagaGGcTCTttgCTcACcTGTGGaGATGTgGAagagaaccctggaccc
Light chain generic leader from NCBI 9D9 clone “g9D9” (SEQ ID NO: 66)
ATGGACATGAGAGTGCCTGCTCAACTTCTGGGACTGCTGTTACTGTGGCTTCCTG
Light chain original leader predicted from 9D9 parent hybridoma “o9D9” (SEQ ID NO: 67)
atgaagttgcctgttaggctgttggtgctgatgttctggattcctg
9D9 Light chain sequence minus the leader sequence (SEQ ID NO: 68)
GAGCTAGATGCGATATCGTGATGACCCAGACAACACTGTCTCTGCCTGTGTCTCTGGGAGATCAGGCC
TCTATCAGCTGTAGATCTAGCCAGAGCATTGTGCACTCTAACGGCAACACCTACCTGGAGTGGTACCT
GCAGAAACCAGGACAAAGCCCTAAGCTGCTGATCTACAAAGTGAGCAACCGGTTTAGCGGCGTGCCC
GACAGATTTTCTGGATCTGGCTCTGGCACCGATTTTACACTGAAGATCAGCAGAGTGGAGGCCGAGG
ATCTGGGAGTGTACTACTGCTTTCAGGGCTCTCATGTGCCTTACACATTTGGAGGAGGAACCAAGCTG
GAGATCAAGcgggctgatgctgcaccaactgtatccatcttcccaccatccagtgagcagttaacatctggaggtgcctcagtcgtgtgcttcttgaacaact
tctaccccaaagacatcaatgtcaagtggaagattgatggcagtgaacgacaaaatggcgtcctgaacagttggactgatcaggacagcaaagacagcaccta
cagcatgagcagcaccctcacgttgaccaaggacgagtatgaacgacataacagctatacctgtgaggccactcacaagacatcaacttcacccattgtcaag
agcttcaacaggaatgagtgt
SV40 PolyA (SEQ ID NO: 69)
AGACATGATAAGATACATTGATGAGTTTGGACAAACCACAACTAGAATGCAGTGAAAAAAATGCTTT
ATTTGTGAAATTTGTGATGCTATTGCTTTATTTGTAACCATTATAAGCTGCAATAAACAAGTTAACAAC
AACAATTGCATTCATTTTATGTTTCAGGTTCAGGGGGAGATGTGGGAGGTTTTTTAAAGCAAGTAAAA
CCTCTACAAATGTGGTAAAA
chAd68.5WT-MAG-IRES-Ipilimumab (SEQ ID NO: 70); Ipilimumab sequence is in bold uppercase; GFP is
italicized uppercase; IRES is italicized lowercase
ATGGTGAGCAAGGGCGAGGAGCTGTTCACCGGGGTGGTGCCCATCCTGGTCGAGCTGGACGGCGACGTAA
ACGGCCACAAGTTCAGCGTGTCCGGCGAGGGCGAGGGCGATGCCACCTACGGCAAGCTGACCCTGAAGTT
CATCTGCACCACCGGCAAGCTGCCCGTGCCCTGGCCCACCCTCGTGACCACCCTGACCTACGGCGTGCAGT
GCTTCAGCCGCTACCCCGACCACATGAAGCAGCACGACTTCTTCAAGTCCGCCATGCCCGAAGGCTACGTC
CAGGAGCGCACCATCTTCTTCAAGGACGACGGCAACTACAAGACCCGCGCCGAGGTGAAGTTCGAGGGCGA
CACCCTGGTGAACCGCATCGAGCTGAAGGGCATCGACTTCAAGGAGGACGGCAACATCCTGGGGCACAAGC
TGGAGTACAACTACAACAGCCACAACGTCTATATCATGGCCGACAAGCAGAAGAACGGCATCAAGGTGAACT
TCAAGATCCGCCACAACATCGAGGACGGCAGCGTGCAGCTCGCCGACCACTACCAGCAGAACACCCCCATC
GGCGACGGCCCCGTGCTGCTGCCCGACAACCACTACCTGAGCACCCAGTCCGCCCTGAGCAAAGACCCCA
ACGAGAAGCGCGATCACATGGTCCTGCTGGAGTTCGTGACCGCCGCCGGGATCACTCTCGGCATGGACGA
GCTtTACAAGtagtgaGTTTAAACtccaagtccctgtaccgttactggccgaagccgcttggaataaggccggtgtgcgtttgtctatatgttattttccac
catattgccgtcttttggcaatgtgagggcccggaaacctggccctgtcttcttgacgagcattcctaggggtctttcccctctcgccaaaggaatgcaagg
tctgttgaatgtcgtgaaggaagcagttcctctggaagcttcttgaagacaaacaacgtctgtagcgaccctttgcaggcagcggaaccccccacctggcga
caggtgcctctgcggccaaaagccacgtgtataagatacacctgcaaaggcggcacaaccccagtgccacgttgtgagttggatagttgtggaaagagtcaa
atggctctcctcaagcgtattcaacaaggggctgaaggatgcccagaaggtaccccattgtatgggatctgatctggggcctcggtgcacatgctttacatg
tgtttagtcgaggttaaaaaacgtctaggccccccgaaccacggggacgtggttttcctttgaaaaacacgatgataatATGGAGTTCGGCCTCTCTTGGGT
TTTCTTGGTCGCTTTGCTTAGAGGGGTACAATGTCAAGTCCAATTGGTTGAGTCTGGTGGTGGTGTAG
TTCAACCAGGACGGTCACTTCGGCTCTCCTGTGCCGCATCCGGGTTCACTTTCAGTTCTTACAC
AATGCACTGGGTTAGACAAGCCCCTGGTAAGGGTTTGGAGTGGGTAACGTTCATCTCCTACGAC
GGGAATAATAAGTACTACGCCGACTCAGTCAAGGGGCGATTCACGATATCCCGAGACAATTCAA
AGAATACACTCTATCTCCAAATGAATTCACTCCGGGCTGAGGACACTGCAATCTACTACTGTGC
ACGGACAGGTTGGTTGGGACCCTTCGACTACTGGGGTCAAGGAACACTCGTAACAGTCTCATCC
GCCTCTACAAAGGGTCCATCTGTATTCCCATTGGCACCTTCCTCTAAGAGTACATCAGGCGGGA
CAGCTGCTCTTGGTTGTTTGGTCAAGGACTACTTCCCTGAGCCTGTAACTGTATCTTGGAATTCT
GGTGCACTCACTTCTGGAGTACACACTTTCCCCGCCGTCTTGCAATCATCCGGGCTCTACTCAC
TCTCTTCAGTAGTAACGGTACCATCAAGTAGTCTCGGAACTCAAACGTACATCTGTAATGTTAAT
CACAAGCCTTCTAATACTAAGGTCGACAAGAGAGTCGAGCCCAAGAGTTGTGACAAGACACACA
CTTGTCCACCTTGTCCCGCCCCTGAGTTGCTCGGTGGACCATCAGTCTTCTTGTTTCCCCCAAA
GCCAAAGGACACACTCATGATCTCCCGTACTCCAGAGGTTACTTGTGTCGTCGTCGACGTCTCC
CACGAGGACCCTGAGGTTAAGTTCAATTGGTACGTCGACGGTGTCGAGGTCCACAATGCAAAG
ACAAAGCCTAGGGAAGAGCAATACAATTCCACGTACCGGGTAGTCTCCGTTCTCACAGTTCTCC
ACCAAGACTGGTTGAATGGAAAGGAGTACAAGTGTAAGGTCAGTAATAAGGCCCTTCCCGCCCC
TATCGAGAAGACAATCTCCAAGGCTAAGGGGCAACCTAGAGAGCCCCAAGTATACACATTGCCC
CCAAGTCGGGACGAGCTCACAAAGAATCAAGTTTCCTTGACATGTCTTGTTAAGGGGTTCTACC
CATCAGACATCGCAGTTGAGTGGGAGTCCAATGGGCAACCTGAGAATAATTACAAGACTACACC
ACCCGTCCTTGACAGTGACGGTTCATTCTTCCTCTACAGTAAGTTGACGGTTGACAAGAGTCGG
TGGCAACAAGGAAATGTCTTCTCCTGTTCAGTAATGCACGAGGCTCTCCACAATCACTACACTC
AAAAGTCCTTGTCCCTTTCTCCCGGTAAGCGGAAGAGACGAGGGGTCAGGGCCGAGGGGCGGG
GTTCTCTTCTCACATGTGGAGACGTCGAGGAGAATCCTGGTCCTATGGAGACTCCCGCCCAATT
GTTGTTCTTGCTCCTCTTGTGGCTTCCCGACACAACTGGGGAGATCGTCCTCACACAATCTCCC
GGGACGCTTTCACTCTCTCCAGGAGAGCGGGCCACGCTCAGTTGTAGAGCAAGTCAAAGTGTC
GGGTCATCATACTTGGCCTGGTACCAACAAAAGCCAGGGCAAGCCCCCAGACTTTTGATCTACG
GGGCCTTCTCCCGAGCCACAGGTATACCCGACCGGTTCTCCGGATCCGGTTCAGGAACGGACTT
CACACTCACTATCTCAAGATTGGAGCCCGAGGACTTCGCCGTATACTACTGTCAACAATACGGT
TCCAGTCCCTGGACGTTCGGTCAAGGGACAAAGGTTGAGATAAAGCGGACAGTCGCCGCTCCG
TCCGTCTTCATCTTCCCACCTTCCGACGAGCAACTCAAGTCTGGAACAGCTTCTGTCGTTTGTCT
CCTCAATAATTTCTACCCCCGCGAGGCAAAGGTTCAATGGAAGGTAGACAATGCTCTCCAAAGT
GGGAATAGTCAAGAGTCTGTTACAGAGCAAGACAGTAAGGACTCTACATACAGTTTGTCATCTA
CACTTACACTTTCTAAGGCCGACTACGAGAAGCACAAGGTATACGCCTGTGAGGTCACTCACCA
AGGATTGTCAAGTCCAGTCACGAAGTCATTCAATCGAGGAGAGTGTtaa
chAd68.5WT-MAG-IRES-Ipilimumab (SEQ ID NO: 71); Ipilimumab sequence is in bold italic
CATCaTCAATAATATACCTCAAACTTTTTGTGCGCGTTAATATGCAAATGAGGCGTTTGAATTTGGGGA
GGAAGGGCGGTGATTGGTCGAGGGATGAGCGACCGTTAGGGGCGGGGCGAGTGACGTTTTGATGACG
TGGTTGCGAGGAGGAGCCAGTTTGCAAGTTCTCGTGGGAAAAGTGACGTCAAACGAGGTGTGGTTTG
AACACGGAAATACTCAATTTTCCCGCGCTCTCTGACAGGAAATGAGGTGTTTCTGGGCGGATGCAAGT
GAAAACGGGCCATTTTCGCGCGAAAACTGAATGAGGAAGTGAAAATCTGAGTAATTTCGCGTTTATG
GCAGGGAGGAGTATTTGCCGAGGGCCGAGTAGACTTTGACCGATTACGTGGGGGTTTCGATTACCGT
GTTTTTCACCTAAATTTCCGCGTACGGTGTCAAAGTCCGGTGTTTTTACGTAGGTGTCAGCTGATCGCC
AGGGTATTTAAACCTGCGCTCTCCAGTCAAGAGGCCACTCTTGAGTGCCAGCGAGAAGAGTTTTCTCC
TCCGCGCCGCGAGTCAGATCTACACTTTGAAAGTAGGGATAACAGGGTAATgacattgattattgactagttGttaaT
AGTAATCAATTACGGGGTCATTAGTTCATAGCCCATATATGGAGTTCCGCGTTACATAACTTACGGTA
AATGGCCCGCCTGGCTGACCGCCCAACGACCCCCGCCCATTGACGTCAATAATGACGTATGTTCCCAT
AGTAACGCCAATAGGGACTTTCCATTGACGTCAATGGGTGGAGTATTTACGGTAAACTGCCCACTTGG
CAGTACATCAAGTGTATCATATGCCAAGTCCGCCCCCTATTGACGTCAATGACGGTAAATGGCCCGCC
TGGCATTATGCCCAGTACATGACCTTACGGGACTTTCCTACTTGGCAGTACATCTACGTATTAGTCATC
GCTATTACCATGgTGATGCGGTTTTGGCAGTACACCAATGGGCGTGGATAGCGGTTTGACTCACGGGG
ATTTCCAAGTCTCCACCCCATTGACGTCAATGGGAGTTTGTTTTGGCACCAAAATCAACGGGACTTTC
CAAAATGTCGTAATAACCCCGCCCCGTTGACGCAAATGGGCGGTAGGCGTGTACGGTGGGAGGTCTA
TATAAGCAGAgcTCGTTTAGTGAACCGTCAGATCGCCTGGAACGCCATCCACGCTGTTTTGACCTCCAT
AGAAGACAGCGATCGCGccaccATGGCCGGGATGTTCCAGGCACTGTCCGAAGGCTGCACACCCTATGA
TATTAACCAGATGCTGAATGTCCTGGGAGACCACCAGGTCTCTGGCCTGGAGCAGCTGGAGAGCATC
ATCAACTTCGAGAAGCTGACCGAGTGGACAAGCTCCAATGTGATGCCTATCCTGTCCCCACTGACCAA
GGGCATCCTGGGCTTCGTGTTTACCCTGACAGTGCCTTCTGAGCGGGGCCTGTCTTGCATCAGCGAGG
CAGACGCAACCACACCAGAGTCCGCCAATCTGGGCGAGGAGATCCTGTCTCAGCTGTACCTGTGGCC
CCGGGTGACATATCACTCCCCTTCTTACGCCTATCACCAGTTCGAGCGGAGAGCCAAGTACAAGAGAC
ACTTCCCAGGCTTTGGCCAGTCTCTGCTGTTCGGCTACCCCGTGTACGTGTTCGGCGATTGCGTGCAGG
GCGACTGGGATGCCATCCGGTTTAGATACTGCGCACCACCTGGATATGCACTGCTGAGGTGTAACGAC
ACCAATTATTCCGCCCTGCTGGCAGTGGGCGCCCTGGAGGGCCCTCGCAATCAGGATTGGCTGGGCGT
GCCAAGGCAGCTGGTGACACGCATGCAGGCCATCCAGAACGCAGGCCTGTGCACCCTGGTGGCAATG
CTGGAGGAGACAATCTTCTGGCTGCAGGCCTTTCTGATGGCCCTGACCGACAGCGGCCCCAAGACAA
ACATCATCGTGGATTCCCAGTACGTGATGGGCATCTCCAAGCCTTCTTTCCAGGAGTTTGTGGACTGG
GAGAACGTGAGCCCAGAGCTGAATTCCACCGATCAGCCATTCTGGCAGGCAGGAATCCTGGCAAGGA
ACCTGGTGCCTATGGTGGCCACAGTGCAGGGCCAGAATCTGAAGTACCAGGGCCAGAGCCTGGTCAT
CAGCGCCTCCATCATCGTGTTTAACCTGCTGGAGCTGGAGGGCGACTATCGGGACGATGGCAACGTGT
GGGTGCACACCCCACTGAGCCCCAGAACACTGAACGCCTGGGTGAAGGCCGTGGAGGAGAAGAAGG
GCATCCCAGTGCACCTGGAGCTGGCCTCCATGACCAATATGGAGCTGATGTCTAGCATCGTGCACCAG
CAGGTGAGGACATACGGACCCGTGTTCATGTGCCTGGGAGGCCTGCTGACCATGGTGGCAGGAGCCG
TGTGGCTGACAGTGCGGGTGCTGGAGCTGTTCAGAGCCGCCCAGCTGGCCAACGATGTGGTGCTGCA
GATCATGGAGCTGTGCGGAGCAGCCTTTCGCCAGGTGTGCCACACCACAGTGCCATGGCCCAATGCCT
CCCTGACCCCCAAGTGGAACAATGAGACAACACAGCCTCAGATCGCCAACTGTAGCGTGTACGACTT
CTTCGTGTGGCTGCACTACTATAGCGTGAGGGATACCCTGTGGCCCCGCGTGACATACCACATGAATA
AGTACGCCTATCACATGCTGGAGAGGCGCGCCAAGTATAAGAGAGGCCCTGGCCCAGGCGCAAAGTT
TGTGGCAGCATGGACCCTGAAGGCCGCCGCCGGCCCCGGCCCCGGCCAGTATATCAAGGCTAACAGT
AAGTTCATTGGAATCACAGAGCTGGGACCCGGACCTGGATAATGAGTTTAAACtccaagtccctgtaccgttactgg
ccgaagccgcttggaataaggccggtgtgcgtttgtctatatgttattttccaccatattgccgtcttttggcaatgtgagggcccggaaacctggccctg
tcttcttgacgagcattcctaggggtctttcccctctcgccaaaggaatgcaaggtctgttgaatgtcgtgaaggaagcagttcctctggaagcttcttga
agacaaacaacgtctgtagcgaccattgcaggcagcggaaccccccacctggcgacaggtgcctctgcggccaaaagccacgtgtataagatacacctgca
aaggcggcacaaccccagtgccacgttgtgagttggatagttgtggaaagagtcaaatggctctcctcaagcgtattcaacaaggggctgaaggatgccca
gaaggtaccccattgtatgggatctgatctggggcctcggtgcacatgctttacatgtgtttagtcgaggttaaaaaacgtctaggccccccgaaccacgg

[chemical structure]

[chemical structure]

ATAAGATACATTGATGAGTTTGGACAAACCACAACTAGAATGCAGTGAAAAAAATGCTTTATTTGTG
AAATTTGTGATGCTATTGCTTTATTTGTAACCATTATAAGCTGCAATAAACAAGTTAACAACAACAAT
TGCATTCATTTTATGTTTCAGGTTCAGGGGGAGATGTGGGAGGTTTTTTAAAGCAAGTAAAACCTCTA
CAAATGTGGTAAAATAACTATAACGGTCCTAAGGTAGCGAGTGAGTAGTGTTCTGGGGCGGGGGAGG
ACCTGCATGAGGGCCAGAATAACTGAAATCTGTGCTTTTCTGTGTGTTGCAGCAGCATGAGCGGAAGC
GGCTCCTTTGAGGGAGGGGTATTCAGCCCTTATCTGACGGGGCGTCTCCCCTCCTGGGCGGGAGTGCG
TCAGAATGTGATGGGATCCACGGTGGACGGCCGGCCCGTGCAGCCCGCGAACTCTTCAACCCTGACCT
ATGCAACCCTGAGCTCTTCGTCGTTGGACGCAGCTGCCGCCGCAGCTGCTGCATCTGCCGCCAGCGCC
GTGCGCGGAATGGCCATGGGCGCCGGCTACTACGGCACTCTGGTGGCCAACTCGAGTTCCACCAATA
ATCCCGCCAGCCTGAACGAGGAGAAGCTGTTGCTGCTGATGGCCCAGCTCGAGGCCTTGACCCAGCG
CCTGGGCGAGCTGACCCAGCAGGTGGCTCAGCTGCAGGAGCAGACGCGGGCCGCGGTTGCCACGGTG
AAATCCAAATAAAAAATGAATCAATAAATAAACGGAGACGGTTGTTGATTTTAACACAGAGTCTGAA
TCTTTATTTGATTTTTCGCGCGCGGTAGGCCCTGGACCACCGGTCTCGATCATTGAGCACCCGGTGGAT
CTTTTCCAGGACCCGGTAGAGGTGGGCTTGGATGTTGAGGTACATGGGCATGAGCCCGTCCCGGGGGT
GGAGGTAGCTCCATTGCAGGGCCTCGTGCTCGGGGGTGGTGTTGTAAATCACCCAGTCATAGCAGGG
GCGCAGGGCATGGTGTTGCACAATATCTTTGAGGAGGAGACTGATGGCCACGGGCAGCCCTTTGGTG
TAGGTGTTTACAAATCTGTTGAGCTGGGAGGGATGCATGCGGGGGGAGATGAGGTGCATCTTGGCCT
GGATCTTGAGATTGGCGATGTTACCGCCCAGATCCCGCCTGGGGTTCATGTTGTGCAGGACCACCAGC
ACGGTGTATCCGGTGCACTTGGGGAATTTATCATGCAACTTGGAAGGGAAGGCGTGAAAGAATTTGG
CGACGCCTTTGTGCCCGCCCAGGTTTTCCATGCACTCATCCATGATGATGGCGATGGGCCCGTGGGCG
GCGGCCTGGGCAAAGACGTTTCGGGGGTCGGACACATCATAGTTGTGGTCCTGGGTGAGGTCATCAT
AGGCCATTTTAATGAATTTGGGGCGGAGGGTGCCGGACTGGGGGACAAAGGTtCCCTCGATCCCGGGG
GCGTAGTTCCCCTCACAGATCTGCATCTCCCAGGCTTTGAGCTCGGAGGGGGGGATCATGTCCACCTG
CGGGGCGATAAAGAACACGGTTTCCGGGGCGGGGGAGATGAGCTGGGCCGAAAGCAAGTTCCGGAG
CAGCTGGGACTTGCCGCAGCCGGTGGGGCCGTAGATGACCCCGATGACCGGCTGCAGGTGGTAGTTG
AGGGAGAGACAGCTGCCGTCCTCCCGGAGGAGGGGGGCCACCTCGTTCATCATCTCGCGCACGTGCA
TGTTCTCGCGCACCAGTTCCGCCAGGAGGCGCTCTCCCCCCAGGGATAGGAGCTCCTGGAGCGAGGC
GAAGTTTTTCAGCGGCTTGAGTCCGTCGGCCATGGGCATTTTGGAGAGGGTTTGTTGCAAGAGTTCCA
GGCGGTCCCAGAGCTCGGTGATGTGCTCTACGGCATCTCGATCCAGCAGACCTCCTCGTTTCGCGGGT
TGGGACGGCTGCGGGAGTAGGGCACCAGACGATGGGCGTCCAGCGCAGCCAGGGTCCGGTCCTTCCA
GGGTCGCAGCGTCCGCGTCAGGGTGGTCTCCGTCACGGTGAAGGGGTGCGCGCCGGGCTGGGCGCTT
GCGAGGGTGCGCTTCAGGCTCATCCGGCTGGTCGAAAACCGCTCCCGATCGGCGCCCTGCGCGTCGGC
CAGGTAGCAATTGACCATGAGTTCGTAGTTGAGCGCCTCGGCCGCGTGGCCTTTGGCGCGGAGCTTAC
CTTTGGAAGTCTGCCCGCAGGCGGGACAGAGGAGGGACTTGAGGGCGTAGAGCTTGGGGGCGAGGA
AGACGGACTCGGGGGCGTAGGCGTCCGCGCCGCAGTGGGCGCAGACGGTCTCGCACTCCACGAGCCA
GGTGAGGTCGGGCTGGTCGGGGTCAAAAACCAGTTTCCCGCCGTTCTTTTTGATGCGTTTCTTACCTTT
GGTCTCCATGAGCTCGTGTCCCCGCTGGGTGACAAAGAGGCTGTCCGTGTCCCCGTAGACCGACTTTA
TGGGCCGGTCCTCGAGCGGTGTGCCGCGGTCCTCCTCGTAGAGGAACCCCGCCCACTCCGAGACGAA
AGCCCGGGTCCAGGCCAGCACGAAGGAGGCCACGTGGGACGGGTAGCGGTCGTTGTCCACCAGCGGG
TCCACCTTTTCCAGGGTATGCAAACACATGTCCCCCTCGTCCACATCCAGGAAGGTGATTGGCTTGTA
AGTGTAGGCCACGTGACCGGGGGTCCCGGCCGGGGGGGTATAAAAGGGTGCGGGTCCCTGCTCGTCC
TCACTGTCTTCCGGATCGCTGTCCAGGAGCGCCAGCTGTTGGGGTAGGTATTCCCTCTCGAAGGCGGG
CATGACCTCGGCACTCAGGTTGTCAGTTTCTAGAAACGAGGAGGATTTGATATTGACGGTGCCGGCGG
AGATGCCTTTCAAGAGCCCCTCGTCCATCTGGTCAGAAAAGACGATCTTTTTGTTGTCGAGCTTGGTG
GCGAAGGAGCCGTAGAGGGCGTTGGAGAGGAGCTTGGCGATGGAGCGCATGGTCTGGTTTTTTTCCTT
GTCGGCGCGCTCCTTGGCGGCGATGTTGAGCTGCACGTACTCGCGCGCCACGCACTTCCATTCGGGGA
AGACGGTGGTCAGCTCGTCGGGCACGATTCTGACCTGCCAGCCCCGATTATGCAGGGTGATGAGGTCC
ACACTGGTGGCCACCTCGCCGCGCAGGGGCTCATTAGTCCAGCAGAGGCGTCCGCCCTTGCGCGAGC
AGAAGGGGGGCAGGGGGTCCAGCATGACCTCGTCGGGGGGGTCGGCATCGATGGTGAAGATGCCGG
GCAGGAGGTCGGGGTCAAAGTAGCTGATGGAAGTGGCCAGATCGTCCAGGGCAGCTTGCCATTCGCG
CACGGCCAGCGCGCGCTCGTAGGGACTGAGGGGCGTGCCCCAGGGCATGGGATGGGTAAGCGCGGA
GGCGTACATGCCGCAGATGTCGTAGACGTAGAGGGGCTCCTCGAGGATGCCGATGTAGGTGGGGTAG
CAGCGCCCCCCGCGGATGCTGGCGCGCACGTAGTCATACAGCTCGTGCGAGGGGGCGAGGAGCCCCG
GGCCCAGGTTGGTGCGACTGGGCTTTTCGGCGCGGTAGACGATCTGGCGGAAAATGGCATGCGAGTT
GGAGGAGATGGTGGGCCTTTGGAAGATGTTGAAGTGGGCGTGGGGCAGTCCGACCGAGTCGCGGATG
AAGTGGGCGTAGGAGTCTTGCAGCTTGGCGACGAGCTCGGCGGTGACTAGGACGTCCAGAGCGCAGT
AGTCGAGGGTCTCCTGGATGATGTCATACTTGAGCTGTCCCTTTTGTTTCCACAGCTCGCGGTTGAGAA
GGAACTCTTCGCGGTCCTTCCAGTACTCTTCGAGGGGGAACCCGTCCTGATCTGCACGGTAAGAGCCT
AGCATGTAGAACTGGTTGACGGCCTTGTAGGCGCAGCAGCCCTTCTCCACGGGGAGGGCGTAGGCCT
GGGCGGCCTTGCGCAGGGAGGTGTGCGTGAGGGCGAAAGTGTCCCTGACCATGACCTTGAGGAACTG
GTGCTTGAAGTCGATATCGTCGCAGCCCCCCTGCTCCCAGAGCTGGAAGTCCGTGCGCTTCTTGTAGG
CGGGGTTGGGCAAAGCGAAAGTAACATCGTTGAAGAGGATCTTGCCCGCGCGGGGCATAAAGTTGCG
AGTGATGCGGAAAGGTTGGGGCACCTCGGCCCGGTTGTTGATGACCTGGGCGGCGAGCACGATCTCG
TCGAAGCCGTTGATGTTGTGGCCCACGATGTAGAGTTCCACGAATCGCGGACGGCCCTTGACGTGGGG
CAGTTTCTTGAGCTCCTCGTAGGTGAGCTCGTCGGGGTCGCTGAGCCCGTGCTGCTCGAGCGCCCAGT
CGGCGAGATGGGGGTTGGCGCGGAGGAAGGAAGTCCAGAGATCCACGGCCAGGGCGGTTTGCAGAC
GGTCCCGGTACTGACGGAACTGCTGCCCGACGGCCATTTTTTCGGGGGTGACGCAGTAGAAGGTGCG
GGGGTCCCCGTGCCAGCGATCCCATTTGAGCTGGAGGGCGAGATCGAGGGCGAGCTCGACGAGCCGG
TCGTCCCCGGAGAGTTTCATGACCAGCATGAAGGGGACGAGCTGCTTGCCGAAGGACCCCATCCAGG
TGTAGGTTTCCACATCGTAGGTGAGGAAGAGCCTTTCGGTGCGAGGATGCGAGCCGATGGGGAAGAA
CTGGATCTCCTGCCACCAATTGGAGGAATGGCTGTTGATGTGATGGAAGTAGAAATGCCGACGGCGC
GCCGAACACTCGTGCTTGTGTTTATACAAGCGGCCACAGTGCTCGCAACGCTGCACGGGATGCACGTG
CTGCACGAGCTGTACCTGAGTTCCTTTGACGAGGAATTTCAGTGGGAAGTGGAGTCGTGGCGCCTGCA
TCTCGTGCTGTACTACGTCGTGGTGGTCGGCCTGGCCCTCTTCTGCCTCGATGGTGGTCATGCTGACGA
GCCCGCGCGGGAGGCAGGTCCAGACCTCGGCGCGAGCGGGTCGGAGAGCGAGGACGAGGGCGCGCA
GGCCGGAGCTGTCCAGGGTCCTGAGACGCTGCGGAGTCAGGTCAGTGGGCAGCGGCGGCGCGCGGTT
GACTTGCAGGAGTTTTTCCAGGGCGCGCGGGAGGTCCAGATGGTACTTGATCTCCACCGCGCCATTGG
TGGCGACGTCGATGGCTTGCAGGGTCCCGTGCCCCTGGGGTGTGACCACCGTCCCCCGTTTCTTCTTG
GGCGGCTGGGGCGACGGGGGCGGTGCCTCTTCCATGGTTAGAAGCGGCGGCGAGGACGCGCGCCGGG
CGGCAGGGGCGGCTCGGGGCCCGGAGGCAGGGGCGGCAGGGGCACGTCGGCGCCGCGCGCGGGTAG
GTTCTGGTACTGCGCCCGGAGAAGACTGGCGTGAGCGACGACGCGACGGTTGACGTCCTGGATCTGA
CGCCTCTGGGTGAAGGCCACGGGACCCGTGAGTTTGAACCTGAAAGAGAGTTCGACAGAATCAATCT
CGGTATCGTTGACGGCGGCCTGCCGCAGGATCTCTTGCACGTCGCCCGAGTTGTCCTGGTAGGCGATC
TCGGTCATGAACTGCTCGATCTCCTCCTCTTGAAGGTCTCCGCGGCCGGCGCGCTCCACGGTGGCCGC
GAGGTCGTTGGAGATGCGGCCCATGAGCTGCGAGAAGGCGTTCATGCCCGCCTCGTTCCAGACGCGG
CTGTAGACCACGACGCCCTCGGGATCGCgGGCGCGCATGACCACCTGGGCGAGGTTGAGCTCCACGTG
GCGCGTGAAGACCGCGTAGTTGCAGAGGCGCTGGTAGAGGTAGTTGAGCGTGGTGGCGATGTGCTCG
GTGACGAAGAAATACATGATCCAGCGGCGGAGCGGCATCTCGCTGACGTCGCCCAGCGCCTCCAAAC
GTTCCATGGCCTCGTAAAAGTCCACGGCGAAGTTGAAAAACTGGGAGTTGCGCGCCGAGACGGTCAA
CTCCTCCTCCAGAAGACGGATGAGCTCGGCGATGGTGGCGCGCACCTCGCGCTCGAAGGCCCCCGGG
AGTTCCTCCACTTCCTCTTCTTCCTCCTCCACTAACATCTCTTCTACTTCCTCCTCAGGCGGCAGTGGTG
GCGGGGGAGGGGGCCTGCGTCGCCGGCGGCGCACGGGCAGACGGTCGATGAAGCGCTCGATGGTCTC
GCCGCGCCGGCGTCGCATGGTCTCGGTGACGGCGCGCCCGTCCTCGCGGGGCCGCAGCGTGAAGACG
CCGCCGCGCATCTCCAGGTGGCCGGGGGGGTCCCCGTTGGGCAGGGAGAGGGCGCTGACGATGCATC
TTATCAATTGCCCCGTAGGGACTCCGCGCAAGGACCTGAGCGTCTCGAGATCCACGGGATCTGAAAA
CCGCTGAACGAAGGCTTCGAGCCAGTCGCAGTCGCAAGGTAGGCTGAGCACGGTTTCTTCTGGCGGG
TCATGTTGGTTGGGAGCGGGGCGGGCGATGCTGCTGGTGATGAAGTTGAAATAGGCGGTTCTGAGAC
GGCGGATGGTGGCGAGGAGCACCAGGTCTTTGGGCCCGGCTTGCTGGATGCGCAGACGGTCGGCCAT
GCCCCAGGCGTGGTCCTGACACCTGGCCAGGTCCTTGTAGTAGTCCTGCATGAGCCGCTCCACGGGCA
CCTCCTCCTCGCCCGCGCGGCCGTGCATGCGCGTGAGCCCGAAGCCGCGCTGGGGCTGGACGAGCGC
CAGGTCGGCGACGACGCGCTCGGCGAGGATGGCTTGCTGGATCTGGGTGAGGGTGGTCTGGAAGTCA
TCAAAGTCGACGAAGCGGTGGTAGGCTCCGGTGTTGATGGTGTAGGAGCAGTTGGCCATGACGGACC
AGTTGACGGTCTGGTGGCCCGGACGCACGAGCTCGTGGTACTTGAGGCGCGAGTAGGCGCGCGTGTC
GAAGATGTAGTCGTTGCAGGTGCGCACCAGGTACTGGTAGCCGATGAGGAAGTGCGGCGGCGGCTGG
CGGTAGAGCGGCCATCGCTCGGTGGCGGGGGCGCCGGGCGCGAGGTCCTCGAGCATGGTGCGGTGGT
AGCCGTAGATGTACCTGGACATCCAGGTGATGCCGGCGGCGGTGGTGGAGGCGCGCGGGAACTCGCG
GACGCGGTTCCAGATGTTGCGCAGCGGCAGGAAGTAGTTCATGGTGGGCACGGTCTGGCCCGTGAGG
CGCGCGCAGTCGTGGATGCTCTATACGGGCAAAAACGAAAGCGGTCAGCGGCTCGACTCCGTGGCCT
GGAGGCTAAGCGAACGGGTTGGGCTGCGCGTGTACCCCGGTTCGAATCTCGAATCAGGCTGGAGCCG
CAGCTAACGTGGTATTGGCACTCCCGTCTCGACCCAAGCCTGCACCAACCCTCCAGGATACGGAGGCG
GGTCGTTTTGCAACTTTTTTTTGGAGGCCGGATGAGACTAGTAAGCGCGGAAAGCGGCCGACCGCGAT
GGCTCGCTGCCGTAGTCTGGAGAAGAATCGCCAGGGTTGCGTTGCGGTGTGCCCCGGTTCGAGGCCG
GCCGGATTCCGCGGCTAACGAGGGCGTGGCTGCCCCGTCGTTTCCAAGACCCCATAGCCAGCCGACTT
CTCCAGTTACGGAGCGAGCCCCTCTTTTGTTTTGTTTGTTTTTGCCAGATGCATCCCGTACTGCGGCAG
ATGCGCCCCCACCACCCTCCACCGCAACAACAGCCCCCTCCACAGCCGGCGCTTCTGCCCCCGCCCCA
GCAGCAACTTCCAGCCACGACCGCCGCGGCCGCCGTGAGCGGGGCTGGACAGAGTTATGATCACCAG
CTGGCCTTGGAAGAGGGCGAGGGGCTGGCGCGCCTGGGGGCGTCGTCGCCGGAGCGGCACCCGCGCG
TGCAGATGAAAAGGGACGCTCGCGAGGCCTACGTGCCCAAGCAGAACCTGTTCAGAGACAGGAGCG
GCGAGGAGCCCGAGGAGATGCGCGCGGCCCGGTTCCACGCGGGGCGGGAGCTGCGGCGCGGCCTGG
ACCGAAAGAGGGTGCTGAGGGACGAGGATTTCGAGGCGGACGAGCTGACGGGGATCAGCCCCGCGC
GCGCGCACGTGGCCGCGGCCAACCTGGTCACGGCGTACGAGCAGACCGTGAAGGAGGAGAGCAACTT
CCAAAAATCCTTCAACAACCACGTGCGCACCCTGATCGCGCGCGAGGAGGTGACCCTGGGCCTGATG
CACCTGTGGGACCTGCTGGAGGCCATCGTGCAGAACCCCACCAGCAAGCCGCTGACGGCGCAGCTGT
TCCTGGTGGTGCAGCATAGTCGGGACAACGAAGCGTTCAGGGAGGCGCTGCTGAATATCACCGAGCC
CGAGGGCCGCTGGCTCCTGGACCTGGTGAACATTCTGCAGAGCATCGTGGTGCAGGAGCGCGGGCTG
CCGCTGTCCGAGAAGCTGGCGGCCATCAACTTCTCGGTGCTGAGTTTGGGCAAGTACTACGCTAGGAA
GATCTACAAGACCCCGTACGTGCCCATAGACAAGGAGGTGAAGATCGACGGGTTTTACATGCGCATG
ACCCTGAAAGTGCTGACCCTGAGCGACGATCTGGGGGTGTACCGCAACGACAGGATGCACCGTGCGG
TGAGCGCCAGCAGGCGGCGCGAGCTGAGCGACCAGGAGCTGATGCATAGTCTGCAGCGGGCCCTGAC
CGGGGCCGGGACCGAGGGGGAGAGCTACTTTGACATGGGCGCGGACCTGCACTGGCAGCCCAGCCGC
CGGGCCTTGGAGGCGGCGGCAGGACCCTACGTAGAAGAGGTGGACGATGAGGTGGACGAGGAGGGC
GAGTACCTGGAAGACTGATGGCGCGACCGTATTTTTGCTAGATGCAACAACAACAGCCACCTCCTGAT
CCCGCGATGCGGGCGGCGCTGCAGAGCCAGCCGTCCGGCATTAACTCCTCGGACGATTGGACCCAGG
CCATGCAACGCATCATGGCGCTGACGACCCGCAACCCCGAAGCCTTTAGACAGCAGCCCCAGGCCAA
CCGGCTCTCGGCCATCCTGGAGGCCGTGGTGCCCTCGCGCTCCAACCCCACGCACGAGAAGGTCCTGG
CCATCGTGAACGCGCTGGTGGAGAACAAGGCCATCCGCGGCGACGAGGCCGGCCTGGTGTACAACGC
GCTGCTGGAGCGCGTGGCCCGCTACAACAGCACCAACGTGCAGACCAACCTGGACCGCATGGTGACC
GACGTGCGCGAGGCCGTGGCCCAGCGCGAGCGGTTCCACCGCGAGTCCAACCTGGGATCCATGGTGG
CGCTGAACGCCTTCCTCAGCACCCAGCCCGCCAACGTGCCCCGGGGCCAGGAGGACTACACCAACTT
CATCAGCGCCCTGCGCCTGATGGTGACCGAGGTGCCCCAGAGCGAGGTGTACCAGTCCGGGCCGGAC
TACTTCTTCCAGACCAGTCGCCAGGGCTTGCAGACCGTGAACCTGAGCCAGGCTTTCAAGAACTTGCA
GGGCCTGTGGGGCGTGCAGGCCCCGGTCGGGGACCGCGCGACGGTGTCGAGCCTGCTGACGCCGAAC
TCGCGCCTGCTGCTGCTGCTGGTGGCCCCCTTCACGGACAGCGGCAGCATCAACCGCAACTCGTACCT
GGGCTACCTGATTAACCTGTACCGCGAGGCCATCGGCCAGGCGCACGTGGACGAGCAGACCTACCAG
GAGATCACCCACGTGAGCCGCGCCCTGGGCCAGGACGACCCGGGCAACCTGGAAGCCACCCTGAACT
TTTTGCTGACCAACCGGTCGCAGAAGATCCCGCCCCAGTACGCGCTCAGCACCGAGGAGGAGCGCAT
CCTGCGTTACGTGCAGCAGAGCGTGGGCCTGTTCCTGATGCAGGAGGGGGCCACCCCCAGCGCCGCG
CTCGACATGACCGCGCGCAACATGGAGCCCAGCATGTACGCCAGCAACCGCCCGTTCATCAATAAAC
TGATGGACTACTTGCATCGGGCGGCCGCCATGAACTCTGACTATTTCACCAACGCCATCCTGAATCCC
CACTGGCTCCCGCCGCCGGGGTTCTACACGGGCGAGTACGACATGCCCGACCCCAATGACGGGTTCCT
GTGGGACGATGTGGACAGCAGCGTGTTCTCCCCCCGACCGGGTGCTAACGAGCGCCCCTTGTGGAAG
AAGGAAGGCAGCGACCGACGCCCGTCCTCGGCGCTGTCCGGCCGCGAGGGTGCTGCCGCGGCGGTGC
CCGAGGCCGCCAGTCCTTTCCCGAGCTTGCCCTTCTCGCTGAACAGTATCCGCAGCAGCGAGCTGGGC
AGGATCACGCGCCCGCGCTTGCTGGGCGAAGAGGAGTACTTGAATGACTCGCTGTTGAGACCCGAGC
GGGAGAAGAACTTCCCCAATAACGGGATAGAAAGCCTGGTGGACAAGATGAGCCGCTGGAAGACGT
ATGCGCAGGAGCACAGGGACGATCCCCGGGCGTCGCAGGGGGCCACGAGCCGGGGCAGCGCCGCCC
GTAAACGCCGGTGGCACGACAGGCAGCGGGGACAGATGTGGGACGATGAGGACTCCGCCGACGACA
GCAGCGTGTTGGACTTGGGTGGGAGTGGTAACCCGTTCGCTCACCTGCGCCCCCGTATCGGGCGCATG
ATGTAAGAGAAACCGAAAATAAATGATACTCACCAAGGCCATGGCGACCAGCGTGCGTTCGTTTCTT
CTCTGTTGTTGTTGTATCTAGTATGATGAGGCGTGCGTACCCGGAGGGTCCTCCTCCCTCGTACGAGA
GCGTGATGCAGCAGGCGATGGCGGCGGCGGCGATGCAGCCCCCGCTGGAGGCTCCTTACGTGCCCCC
GCGGTACCTGGCGCCTACGGAGGGGCGGAACAGCATTCGTTACTCGGAGCTGGCACCCTTGTACGAT
ACCACCCGGTTGTACCTGGTGGACAACAAGTCGGCGGACATCGCCTCGCTGAACTACCAGAACGACC
ACAGCAACTTCCTGACCACCGTGGTGCAGAACAATGACTTCACCCCCACGGAGGCCAGCACCCAGAC
CATCAACTTTGACGAGCGCTCGCGGTGGGGCGGCCAGCTGAAAACCATCATGCACACCAACATGCCC
AACGTGAACGAGTTCATGTACAGCAACAAGTTCAAGGCGCGGGTGATGGTCTCCCGCAAGACCCCCA
ATGGGGTGACAGTGACAGAGGATTATGATGGTAGTCAGGATGAGCTGAAGTATGAATGGGTGGAATT
TGAGCTGCCCGAAGGCAACTTCTCGGTGACCATGACCATCGACCTGATGAACAACGCCATCATCGAC
AATTACTTGGCGGTGGGGCGGCAGAACGGGGTGCTGGAGAGCGACATCGGCGTGAAGTTCGACACTA
GGAACTTCAGGCTGGGCTGGGACCCCGTGACCGAGCTGGTCATGCCCGGGGTGTACACCAACGAGGC
TTTCCATCCCGATATTGTCTTGCTGCCCGGCTGCGGGGTGGACTTCACCGAGAGCCGCCTCAGCAACC
TGCTGGGCATTCGCAAGAGGCAGCCCTTCCAGGAAGGCTTCCAGATCATGTACGAGGATCTGGAGGG
GGGCAACATCCCCGCGCTCCTGGATGTCGACGCCTATGAGAAAAGCAAGGAGGATGCAGCAGCTGAA
GCAACTGCAGCCGTAGCTACCGCCTCTACCGAGGTCAGGGGCGATAATTTTGCAAGCGCCGCAGCAG
TGGCAGCGGCCGAGGCGGCTGAAACCGAAAGTAAGATAGTCATTCAGCCGGTGGAGAAGGATAGCA
AGAACAGGAGCTACAACGTACTACCGGACAAGATAAACACCGCCTACCGCAGCTGGTACCTAGCCTA
CAACTATGGCGACCCCGAGAAGGGCGTGCGCTCCTGGACGCTGCTCACCACCTCGGACGTCACCTGC
GGCGTGGAGCAAGTCTACTGGTCGCTGCCCGACATGATGCAAGACCCGGTCACCTTCCGCTCCACGCG
TCAAGTTAGCAACTACCCGGTGGTGGGCGCCGAGCTCCTGCCCGTCTACTCCAAGAGCTTCTTCAACG
AGCAGGCCGTCTACTCGCAGCAGCTGCGCGCCTTCACCTCGCTTACGCACGTCTTCAACCGCTTCCCC
GAGAACCAGATCCTCGTCCGCCCGCCCGCGCCCACCATTACCACCGTCAGTGAAAACGTTCCTGCTCT
CACAGATCACGGGACCCTGCCGCTGCGCAGCAGTATCCGGGGAGTCCAGCGCGTGACCGTTACTGAC
GCCAGACGCCGCACCTGCCCCTACGTCTACAAGGCCCTGGGCATAGTCGCGCCGCGCGTCCTCTCGAG
CCGCACCTTCTAAATGTCCATTCTCATCTCGCCCAGTAATAACACCGGTTGGGGCCTGCGCGCGCCCA
GCAAGATGTACGGAGGCGCTCGCCAACGCTCCACGCAACACCCCGTGCGCGTGCGCGGGCACTTCCG
CGCTCCCTGGGGCGCCCTCAAGGGCCGCGTGCGGTCGCGCACCACCGTCGACGACGTGATCGACCAG
GTGGTGGCCGACGCGCGCAACTACACCCCCGCCGCCGCGCCCGTCTCCACCGTGGACGCCGTCATCGA
CAGCGTGGTGGCcGACGCGCGCCGGTACGCCCGCGCCAAGAGCCGGCGGCGGCGCATCGCCCGGCGG
CACCGGAGCACCCCCGCCATGCGCGCGGCGCGAGCCTTGCTGCGCAGGGCCAGGCGCACGGGACGCA
GGGCCATGCTCAGGGCGGCCAGACGCGCGGCTTCAGGCGCCAGCGCCGGCAGGACCCGGAGACGCG
CGGCCACGGCGGCGGCAGCGGCCATCGCCAGCATGTCCCGCCCGCGGCGAGGGAACGTGTACTGGGT
GCGCGACGCCGCCACCGGTGTGCGCGTGCCCGTGCGCACCCGCCCCCCTCGCACTTGAAGATGTTCAC
TTCGCGATGTTGATGTGTCCCAGCGGCGAGGAGGATGTCCAAGCGCAAATTCAAGGAAGAGATGCTC
CAGGTCATCGCGCCTGAGATCTACGGCCCTGCGGTGGTGAAGGAGGAAAGAAAGCCCCGCAAAATCA
AGCGGGTCAAAAAGGACAAAAAGGAAGAAGAAAGTGATGTGGACGGATTGGTGGAGTTTGTGCGCG
AGTTCGCCCCCCGGCGGCGCGTGCAGTGGCGCGGGCGGAAGGTGCAACCGGTGCTGAGACCCGGCAC
CACCGTGGTCTTCACGCCCGGCGAGCGCTCCGGCACCGCTTCCAAGCGCTCCTACGACGAGGTGTACG
GGGATGATGATATTCTGGAGCAGGCGGCCGAGCGCCTGGGCGAGTTTGCTTACGGCAAGCGCAGCCG
TTCCGCACCGAAGGAAGAGGCGGTGTCCATCCCGCTGGACCACGGCAACCCCACGCCGAGCCTCAAG
CCCGTGACCTTGCAGCAGGTGCTGCCGACCGCGGCGCCGCGCCGGGGGTTCAAGCGCGAGGGCGAGG
ATCTGTACCCCACCATGCAGCTGATGGTGCCCAAGCGCCAGAAGCTGGAAGACGTGCTGGAGACCAT
GAAGGTGGACCCGGACGTGCAGCCCGAGGTCAAGGTGCGGCCCATCAAGCAGGTGGCCCCGGGCCTG
GGCGTGCAGACCGTGGACATCAAGATTCCCACGGAGCCCATGGAAACGCAGACCGAGCCCATGATCA
AGCCCAGCACCAGCACCATGGAGGTGCAGACGGATCCCTGGATGCCATCGGCTCCTAGTCGAAGACC
CCGGCGCAAGTACGGCGCGGCCAGCCTGCTGATGCCCAACTACGCGCTGCATCCTTCCATCATCCCCA
CGCCGGGCTACCGCGGCACGCGCTTCTACCGCGGTCATACCAGCAGCCGCCGCCGCAAGACCACCAC
TCGCCGCCGCCGTCGCCGCACCGCCGCTGCAACCACCCCTGCCGCCCTGGTGCGGAGAGTGTACCGCC
GCGGCCGCGCACCTCTGACCCTGCCGCGCGCGCGCTACCACCCGAGCATCGCCATTTAAACTTTCGCCt
GCTTTGCAGATCAATGGCCCTCACATGCCGCCTTCGCGTTCCCATTACGGGCTACCGAGGAAGAAAAC
CGCGCCGTAGAAGGCTGGCGGGGAACGGGATGCGTCGCCACCACCACCGGCGGCGGCGCGCCATCAG
CAAGCGGTTGGGGGGAGGCTTCCTGCCCGCGCTGATCCCCATCATCGCCGCGGCGATCGGGGCGATC
CCCGGCATTGCTTCCGTGGCGGTGCAGGCCTCTCAGCGCCACTGAGACACACTTGGAAACATCTTGTA
ATAAACCaATGGACTCTGACGCTCCTGGTCCTGTGATGTGTTTTCGTAGACAGATGGAAGACATCAAT
TTTTCGTCCCTGGCTCCGCGACACGGCACGCGGCCGTTCATGGGCACCTGGAGCGACATCGGCACCAG
CCAACTGAACGGGGGCGCCTTCAATTGGAGCAGTCTCTGGAGCGGGCTTAAGAATTTCGGGTCCACG
CTTAAAACCTATGGCAGCAAGGCGTGGAACAGCACCACAGGGCAGGCGCTGAGGGATAAGCTGAAA
GAGCAGAACTTCCAGCAGAAGGTGGTCGATGGGCTCGCCTCGGGCATCAACGGGGTGGTGGACCTGG
CCAACCAGGCCGTGCAGCGGCAGATCAACAGCCGCCTGGACCCGGTGCCGCCCGCCGGCTCCGTGGA
GATGCCGCAGGTGGAGGAGGAGCTGCCTCCCCTGGACAAGCGGGGCGAGAAGCGACCCCGCCCCGAT
GCGGAGGAGACGCTGCTGACGCACACGGACGAGCCGCCCCCGTACGAGGAGGCGGTGAAACTGGGT
CTGCCCACCACGCGGCCCATCGCGCCCCTGGCCACCGGGGTGCTGAAACCCGAAAAGCCCGCGACCC
TGGACTTGCCTCCTCCCCAGCCTTCCCGCCCCTCTACAGTGGCTAAGCCCCTGCCGCCGGTGGCCGTG
GCCCGCGCGCGACCCGGGGGCACCGCCCGCCCTCATGCGAACTGGCAGAGCACTCTGAACAGCATCG
TGGGTCTGGGAGTGCAGAGTGTGAAGCGCCGCCGCTGCTATTAAACCTACCGTAGCGCTTAACTTGCT
TGTCTGTGTGTGTATGTATTATGTCGCCGCCGCCGCTGTCCACCAGAAGGAGGAGTGAAGAGGCGCGT
CGCCGAGTTGCAAGATGGCCACCCCATCGATGCTGCCCCAGTGGGCGTACATGCACATCGCCGGACA
GGACGCTTCGGAGTACCTGAGTCCGGGTCTGGTGCAGTTTGCCCGCGCCACAGACACCTACTTCAGTC
TGGGGAACAAGTTTAGGAACCCCACGGTGGCGCCCACGCACGATGTGACCACCGACCGCAGCCAGCG
GCTGACGCTGCGCTTCGTGCCCGTGGACCGCGAGGACAACACCTACTCGTACAAAGTGCGCTACACG
CTGGCCGTGGGCGACAACCGCGTGCTGGACATGGCCAGCACCTACTTTGACATCCGCGGCGTGCTGG
ATCGGGGCCCTAGCTTCAAACCCTACTCCGGCACCGCCTACAACAGTCTGGCCCCCAAGGGAGCACCC
AACACTTGTCAGTGGACATATAAAGCCGATGGTGAAACTGCCACAGAAAAAACCTATACATATGGAA
ATGCACCCGTGCAGGGCATTAACATCACAAAAGATGGTATTCAACTTGGAACTGACACCGATGATCA
GCCAATCTACGCAGATAAAACCTATCAGCCTGAACCTCAAGTGGGTGATGCTGAATGGCATGACATC
ACTGGTACTGATGAAAAGTATGGAGGCAGAGCTCTTAAGCCTGATACCAAAATGAAGCCTTGTTATG
GTTCTTTTGCCAAGCCTACTAATAAAGAAGGAGGTCAGGCAAATGTGAAAACAGGAACAGGCACTAC
TAAAGAATATGACATAGACATGGCTTTCTTTGACAACAGAAGTGCGGCTGCTGCTGGCCTAGCTCCAG
AAATTGTTTTGTATACTGAAAATGTGGATTTGGAAACTCCAGATACCCATATTGTATACAAAGCAGGC
ACAGATGACAGCAGCTCTTCTATTAATTTGGGTCAGCAAGCCATGCCCAACAGACCTAACTACATTGG
TTTCAGAGACAACTTTATCGGGCTCATGTACTACAACAGCACTGGCAATATGGGGGTGCTGGCCGGTC
AGGCTTCTCAGCTGAATGCTGTGGTTGACTTGCAAGACAGAAACACCGAGCTGTCCTACCAGCTCTTG
CTTGACTCTCTGGGTGACAGAACCCGGTATTTCAGTATGTGGAATCAGGCGGTGGACAGCTATGATCC
TGATGTGCGCATTATTGAAAATCATGGTGTGGAGGATGAACTTCCCAACTATTGTTTCCCTCTGGATG
CTGTTGGCAGAACAGATACTTATCAGGGAATTAAGGCTAATGGAACTGATCAAACCACATGGACCAA
AGATGACAGTGTCAATGATGCTAATGAGATAGGCAAGGGTAATCCATTCGCCATGGAAATCAACATC
CAAGCCAACCTGTGGAGGAACTTCCTCTACGCCAACGTGGCCCTGTACCTGCCCGACTCTTACAAGTA
CACGCCGGCCAATGTTACCCTGCCCACCAACACCAACACCTACGATTACATGAACGGCCGGGTGGTG
GCGCCCTCGCTGGTGGACTCCTACATCAACATCGGGGCGCGCTGGTCGCTGGATCCCATGGACAACGT
GAACCCCTTCAACCACCACCGCAATGCGGGGCTGCGCTACCGCTCCATGCTCCTGGGCAACGGGCGCT
ACGTGCCCTTCCACATCCAGGTGCCCCAGAAATTTTTCGCCATCAAGAGCCTCCTGCTCCTGCCCGGG
TCCTACACCTACGAGTGGAACTTCCGCAAGGACGTCAACATGATCCTGCAGAGCTCCCTCGGCAACGA
CCTGCGCACGGACGGGGCCTCCATCTCCTTCACCAGCATCAACCTCTACGCCACCTTCTTCCCCATGGC
GCACAACACGGCCTCCACGCTCGAGGCCATGCTGCGCAACGACACCAACGACCAGTCCTTCAACGAC
TACCTCTCGGCGGCCAACATGCTCTACCCCATCCCGGCCAACGCCACCAACGTGCCCATCTCCATCCC
CTCGCGCAACTGGGCCGCCTTCCGCGGCTGGTCCTTCACGCGTCTCAAGACCAAGGAGACGCCCTCGC
TGGGCTCCGGGTTCGACCCCTACTTCGTCTACTCGGGCTCCATCCCCTACCTCGACGGCACCTTCTACC
TCAACCACACCTTCAAGAAGGTCTCCATCACCTTCGACTCCTCCGTCAGCTGGCCCGGCAACGACCGG
CTCCTGACGCCCAACGAGTTCGAAATCAAGCGCACCGTCGACGGCGAGGGCTACAACGTGGCCCAGT
GCAACATGACCAAGGACTGGTTCCTGGTCCAGATGCTGGCCCACTACAACATCGGCTACCAGGGCTTC
TACGTGCCCGAGGGCTACAAGGACCGCATGTACTCCTTCTTCCGCAACTTCCAGCCCATGAGCCGCCA
GGTGGTGGACGAGGTCAACTACAAGGACTACCAGGCCGTCACCCTGGCCTACCAGCACAACAACTCG
GGCTTCGTCGGCTACCTCGCGCCCACCATGCGCCAGGGCCAGCCCTACCCCGCCAACTACCCCTACCC
GCTCATCGGCAAGAGCGCCGTCACCAGCGTCACCCAGAAAAAGTTCCTCTGCGACAGGGTCATGTGG
CGCATCCCCTTCTCCAGCAACTTCATGTCCATGGGCGCGCTCACCGACCTCGGCCAGAACATGCTCTA
TGCCAACTCCGCCCACGCGCTAGACATGAATTTCGAAGTCGACCCCATGGATGAGTCCACCCTTCTCT
ATGTTGTCTTCGAAGTCTTCGACGTCGTCCGAGTGCACCAGCCCCACCGCGGCGTCATCGAGGCCGTC
TACCTGCGCACCCCCTTCTCGGCCGGTAACGCCACCACCTAAGCTCTTGCTTCTTGCAAGCCATGGCC
GCGGGCTCCGGCGAGCAGGAGCTCAGGGCCATCATCCGCGACCTGGGCTGCGGGCCCTACTTCCTGG
GCACCTTCGATAAGCGCTTCCCGGGATTCATGGCCCCGCACAAGCTGGCCTGCGCCATCGTCAACACG
GCCGGCCGCGAGACCGGGGGCGAGCACTGGCTGGCCTTCGCCTGGAACCCGCGCTCGAACACCTGCT
ACCTCTTCGACCCCTTCGGGTTCTCGGACGAGCGCCTCAAGCAGATCTACCAGTTCGAGTACGAGGGC
CTGCTGCGCCGCAGCGCCCTGGCCACCGAGGACCGCTGCGTCACCCTGGAAAAGTCCACCCAGACCG
TGCAGGGTCCGCGCTCGGCCGCCTGCGGGCTCTTCTGCTGCATGTTCCTGCACGCCTTCGTGCACTGGC
CCGACCGCCCCATGGACAAGAACCCCACCATGAACTTGCTGACGGGGGTGCCCAACGGCATGCTCCA
GTCGCCCCAGGTGGAACCCACCCTGCGCCGCAACCAGGAGGCGCTCTACCGCTTCCTCAACTCCCACT
CCGCCTACTTTCGCTCCCACCGCGCGCGCATCGAGAAGGCCACCGCCTTCGACCGCATGAATCAAGAC
ATGTAAACCGTGTGTGTATGTTAAATGTCTTTAATAAACAGCACTTTCATGTTACACATGCATCTGAG
ATGATTTATTTAGAAATCGAAAGGGTTCTGCCGGGTCTCGGCATGGCCCGCGGGCAGGGACACGTTGC
GGAACTGGTACTTGGCCAGCCACTTGAACTCGGGGATCAGCAGTTTGGGCAGCGGGGTGTCGGGGAA
GGAGTCGGTCCACAGCTTCCGCGTCAGTTGCAGGGCGCCCAGCAGGTCGGGCGCGGAGATCTTGAAA
TCGCAGTTGGGACCCGCGTTCTGCGCGCGGGAGTTGCGGTACACGGGGTTGCAGCACTGGAACACCA
TCAGGGCCGGGTGCTTCACGCTCGCCAGCACCGTCGCGTCGGTGATGCTCTCCACGTCGAGGTCCTCG
GCGTTGGCCATCCCGAAGGGGGTCATCTTGCAGGTCTGCCTTCCCATGGTGGGCACGCACCCGGGCTT
GTGGTTGCAATCGCAGTGCAGGGGGATCAGCATCATCTGGGCCTGGTCGGCGTTCATCCCCGGGTACA
TGGCCTTCATGAAAGCCTCCAATTGCCTGAACGCCTGCTGGGCCTTGGCTCCCTCGGTGAAGAAGACC
CCGCAGGACTTGCTAGAGAACTGGTTGGTGGCGCACCCGGCGTCGTGCACGCAGCAGCGCGCGTCGT
TGTTGGCCAGCTGCACCACGCTGCGCCCCCAGCGGTTCTGGGTGATCTTGGCCCGGTCGGGGTTCTCC
TTCAGCGCGCGCTGCCCGTTCTCGCTCGCCACATCCATCTCGATCATGTGCTCCTTCTGGATCATGGTG
GTCCCGTGCAGGCACCGCAGCTTGCCCTCGGCCTCGGTGCACCCGTGCAGCCACAGCGCGCACCCGGT
GCACTCCCAGTTCTTGTGGGCGATCTGGGAATGCGCGTGCACGAAGCCCTGCAGGAAGCGGCCCATC
ATGGTGGTCAGGGTCTTGTTGCTAGTGAAGGTCAGCGGAATGCCGCGGTGCTCCTCGTTGATGTACAG
GTGGCAGATGCGGCGGTACACCTCGCCCTGCTCGGGCATCAGCTGGAAGTTGGCTTTCAGGTCGGTCT
CCACGCGGTAGCGGTCCATCAGCATAGTCATGATTTCCATACCCTTCTCCCAGGCCGAGACGATGGGC
AGGCTCATAGGGTTCTTCACCATCATCTTAGCGCTAGCAGCCGCGGCCAGGGGGTCGCTCTCGTCCAG
GGTCTCAAAGCTCCGCTTGCCGTCCTTCTCGGTGATCCGCACCGGGGGGTAGCTGAAGCCCACGGCCG
CCAGCTCCTCCTCGGCCTGTCTTTCGTCCTCGCTGTCCTGGCTGACGTCCTGCAGGACCACATGCTTGG
TCTTGCGGGGTTTCTTCTTGGGCGGCAGCGGCGGCGGAGATGTTGGAGATGGCGAGGGGGAGCGCGA
GTTCTCGCTCACCACTACTATCTCTTCCTCTTCTTGGTCCGAGGCCACGCGGCGGTAGGTATGTCTCTT
CGGGGGCAGAGGCGGAGGCGACGGGCTCTCGCCGCCGCGACTTGGCGGATGGCTGGCAGAGCCCCTT
CCGCGTTCGGGGGTGCGCTCCCGGCGGCGCTCTGACTGACTTCCTCCGCGGCCGGCCATTGTGTTCTC
CTAGGGAGGAACAACAAGCATGGAGACTCAGCCATCGCCAACCTCGCCATCTGCCCCCACCGCCGAC
GAGAAGCAGCAGCAGCAGAATGAAAGCTTAACCGCCCCGCCGCCCAGCCCCGCCACCTCCGACGCGG
CCGTCCCAGACATGCAAGAGATGGAGGAATCCATCGAGATTGACCTGGGCTATGTGACGCCCGCGGA
GCACGAGGAGGAGCTGGCAGTGCGCTTTTCACAAGAAGAGATACACCAAGAACAGCCAGAGCAGGA
AGCAGAGAATGAGCAGAGTCAGGCTGGGCTCGAGCATGACGGCGACTACCTCCACCTGAGCGGGGG
GGAGGACGCGCTCATCAAGCATCTGGCCCGGCAGGCCACCATCGTCAAGGATGCGCTGCTCGACCGC
ACCGAGGTGCCCCTCAGCGTGGAGGAGCTCAGCCGCGCCTACGAGTTGAACCTCTTCTCGCCGCGCGT
GCCCCCCAAGCGCCAGCCCAATGGCACCTGCGAGCCCAACCCGCGCCTCAACTTCTACCCGGTCTTCG
CGGTGCCCGAGGCCCTGGCCACCTACCACATCTTTTTCAAGAACCAAAAGATCCCCGTCTCCTGCCGC
GCCAACCGCACCCGCGCCGACGCCCTTTTCAACCTGGGTCCCGGCGCCCGCCTACCTGATATCGCCTC
CTTGGAAGAGGTTCCCAAGATCTTCGAGGGTCTGGGCAGCGACGAGACTCGGGCCGCGAACGCTCTG
CAAGGAGAAGGAGGAGAGCATGAGCACCACAGCGCCCTGGTCGAGTTGGAAGGCGACAACGCGCGG
CTGGCGGTGCTCAAACGCACGGTCGAGCTGACCCATTTCGCCTACCCGGCTCTGAACCTGCCCCCCAA
AGTCATGAGCGCGGTCATGGACCAGGTGCTCATCAAGCGCGCGTCGCCCATCTCCGAGGACGAGGGC
ATGCAAGACTCCGAGGAGGGCAAGCCCGTGGTCAGCGACGAGCAGCTGGCCCGGTGGCTGGGTCCTA
ATGCTAGTCCCCAGAGTTTGGAAGAGCGGCGCAAACTCATGATGGCCGTGGTCCTGGTGACCGTGGA
GCTGGAGTGCCTGCGCCGCTTCTTCGCCGACGCGGAGACCCTGCGCAAGGTCGAGGAGAACCTGCAC
TACCTCTTCAGGCACGGGTTCGTGCGCCAGGCCTGCAAGATCTCCAACGTGGAGCTGACCAACCTGGT
CTCCTACATGGGCATCTTGCACGAGAACCGCCTGGGGCAGAACGTGCTGCACACCACCCTGCGCGGG
GAGGCCCGGCGCGACTACATCCGCGACTGCGTCTACCTCTACCTCTGCCACACCTGGCAGACGGGCAT
GGGCGTGTGGCAGCAGTGTCTGGAGGAGCAGAACCTGAAAGAGCTCTGCAAGCTCCTGCAGAAGAAC
CTCAAGGGTCTGTGGACCGGGTTCGACGAGCGCACCACCGCCTCGGACCTGGCCGACCTCATTTTCCC
CGAGCGCCTCAGGCTGACGCTGCGCAACGGCCTGCCCGACTTTATGAGCCAAAGCATGTTGCAAAAC
TTTCGCTCTTTCATCCTCGAACGCTCCGGAATCCTGCCCGCCACCTGCTCCGCGCTGCCCTCGGACTTC
GTGCCGCTGACCTTCCGCGAGTGCCCCCCGCCGCTGTGGAGCCACTGCTACCTGCTGCGCCTGGCCAA
CTACCTGGCCTACCACTCGGACGTGATCGAGGACGTCAGCGGCGAGGGCCTGCTCGAGTGCCACTGC
CGCTGCAACCTCTGCACGCCGCACCGCTCCCTGGCCTGCAACCCCCAGCTGCTGAGCGAGACCCAGAT
CATCGGCACCTTCGAGTTGCAAGGGCCCAGCGAAGGCGAGGGTTCAGCCGCCAAGGGGGGTCTGAAA
CTCACCCCGGGGCTGTGGACCTCGGCCTACTTGCGCAAGTTCGTGCCCGAGGACTACCATCCCTTCGA
GATCAGGTTCTACGAGGACCAATCCCATCCGCCCAAGGCCGAGCTGTCGGCCTGCGTCATCACCCAGG
GGGCGATCCTGGCCCAATTGCAAGCCATCCAGAAATCCCGCCAAGAATTCTTGCTGAAAAAGGGCCG
CGGGGTCTACCTCGACCCCCAGACCGGTGAGGAGCTCAACCCCGGCTTCCCCCAGGATGCCCCGAGG
AAACAAGAAGCTGAAAGTGGAGCTGCCGCCCGTGGAGGATTTGGAGGAAGACTGGGAGAACAGCAG
TCAGGCAGAGGAGGAGGAGATGGAGGAAGACTGGGACAGCACTCAGGCAGAGGAGGACAGCCTGCA
AGACAGTCTGGAGGAAGACGAGGAGGAGGCAGAGGAGGAGGTGGAAGAAGCAGCCGCCGCCAGAC
CGTCGTCCTCGGCGGGGGAGAAAGCAAGCAGCACGGATACCATCTCCGCTCCGGGTCGGGGTCCCGC
TCGACCACACAGTAGATGGGACGAGACCGGACGATTCCCGAACCCCACCACCCAGACCGGTAAGAAG
GAGCGGCAGGGATACAAGTCCTGGCGGGGGCACAAAAACGCCATCGTCTCCTGCTTGCAGGCCTGCG
GGGGCAACATCTCCTTCACCCGGCGCTACCTGCTCTTCCACCGCGGGGTGAACTTTCCCCGCAACATC
TTGCATTACTACCGTCACCTCCACAGCCCCTACTACTTCCAAGAAGAGGCAGCAGCAGCAGAAAAAG
ACCAGCAGAAAACCAGCAGCTAGAAAATCCACAGCGGCGGCAGCAGGTGGACTGAGGATCGCGGCG
AACGAGCCGGCGCAAACCCGGGAGCTGAGGAACCGGATCTTTCCCACCCTCTATGCCATCTTCCAGCA
GAGTCGGGGGCAGGAGCAGGAACTGAAAGTCAAGAACCGTTCTCTGCGCTCGCTCACCCGCAGTTGT
CTGTATCACAAGAGCGAAGACCAACTTCAGCGCACTCTCGAGGACGCCGAGGCTCTCTTCAACAAGT
ACTGCGCGCTCACTCTTAAAGAGTAGCCCGCGCCCGCCCAGTCGCAGAAAAAGGCGGGAATTACGTC
ACCTGTGCCCTTCGCCCTAGCCGCCTCCACCCATCATCATGAGCAAAGAGATTCCCACGCCTTACATG
TGGAGCTACCAGCCCCAGATGGGCCTGGCCGCCGGTGCCGCCCAGGACTACTCCACCCGCATGAATT
GGCTCAGCGCCGGGCCCGCGATGATCTCACGGGTGAATGACATCCGCGCCCACCGAAACCAGATACT
CCTAGAACAGTCAGCGCTCACCGCCACGCCCCGCAATCACCTCAATCCGCGTAATTGGCCCGCCGCCC
TGGTGTACCAGGAAATTCCCCAGCCCACGACCGTACTACTTCCGCGAGACGCCCAGGCCGAAGTCCA
GCTGACTAACTCAGGTGTCCAGCTGGCGGGCGGCGCCACCCTGTGTCGTCACCGCCCCGCTCAGGGTA
TAAAGCGGCTGGTGATCCGGGGCAGAGGCACACAGCTCAACGACGAGGTGGTGAGCTCTTCGCTGGG
TCTGCGACCTGACGGAGTCTTCCAACTCGCCGGATCGGGGAGATCTTCCTTCACGCCTCGTCAGGCCG
TCCTGACTTTGGAGAGTTCGTCCTCGCAGCCCCGCTCGGGTGGCATCGGCACTCTCCAGTTCGTGGAG
GAGTTCACTCCCTCGGTCTACTTCAACCCCTTCTCCGGCTCCCCCGGCCACTACCCGGACGAGTTCATC
CCGAACTTCGACGCCATCAGCGAGTCGGTGGACGGCTACGATTGAAACTAATCACCCCCTTATCCAGT
GAAATAAAGATCATATTGATGATGATTTTACAGAAATAAAAAATAATCATTTGATTTGAAATAAAGAT
ACAATCATATTGATGATTTGAGTTTAACAAAAAAATAAAGAATCACTTACTTGAAATCTGATACCAGG
TCTCTGTCCATGTTTTCTGCCAACACCACTTCACTCCCCTCTTCCCAGCTCTGGTACTGCAGGCCCCGG
CGGGCTGCAAACTTCCTCCACACGCTGAAGGGGATGTCAAATTCCTCCTGTCCCTCAATCTTCATTTTA
TCTTCTATCAGATGTCCAAAAAGCGCGTCCGGGTGGATGATGACTTCGACCCCGTCTACCCCTACGAT
GCAGACAACGCACCGACCGTGCCCTTCATCAACCCCCCCTTCGTCTCTTCAGATGGATTCCAAGAGAA
GCCCCTGGGGGTGTTGTCCCTGCGACTGGCCGACCCCGTCACCACCAAGAACGGGGAAATCACCCTC
AAGCTGGGAGAGGGGGTGGACCTCGATTCCTCGGGAAAACTCATCTCCAACACGGCCACCAAGGCCG
CCGCCCCTCTCAGTTTTTCCAACAACACCATTTCCCTTAACATGGATCACCCCTTTTACACTAAAGATG
GAAAATTATCCTTACAAGTTTCTCCACCATTAAATATACTGAGAACAAGCATTCTAAACACACTAGCT
TTAGGTTTTGGATCAGGTTTAGGACTCCGTGGCTCTGCCTTGGCAGTACAGTTAGTCTCTCCACTTACA
TTTGATACTGATGGAAACATAAAGCTTACCTTAGACAGAGGTTTGCATGTTACAACAGGAGATGCAAT
TGAAAGCAACATAAGCTGGGCTAAAGGTTTAAAATTTGAAGATGGAGCCATAGCAACCAACATTGGA
AATGGGTTAGAGTTTGGAAGCAGTAGTACAGAAACAGGTGTTGATGATGCTTACCCAATCCAAGTTA
AACTTGGATCTGGCCTTAGCTTTGACAGTACAGGAGCCATAATGGCTGGTAACAAAGAAGACGATAA
ACTCACTTTGTGGACAACACCTGATCCATCACCAAACTGTCAAATACTCGCAGAAAATGATGCAAAAC
TAACACTTTGCTTGACTAAATGTGGTAGTCAAATACTGGCCACTGTGTCAGTCTTAGTTGTAGGAAGT
GGAAACCTAAACCCCATTACTGGCACCGTAAGCAGTGCTCAGGTGTTTCTACGTTTTGATGCAAACGG
TGTTCTTTTAACAGAACATTCTACACTAAAAAAATACTGGGGGTATAGGCAGGGAGATAGCATAGAT
GGCACTCCATATACCAATGCTGTAGGATTCATGCCCAATTTAAAAGCTTATCCAAAGTCACAAAGTTC
TACTACTAAAAATAATATAGTAGGGCAAGTATACATGAATGGAGATGTTTCAAAACCTATGCTTCTCA
CTATAACCCTCAATGGTACTGATGACAGCAACAGTACATATTCAATGTCATTTTCATACACCTGGACT
AATGGAAGCTATGTTGGAGCAACATTTGGGGCTAACTCTTATACCTTCTCATACATCGCCCAAGAATG
AACACTGTATCCCACCCTGCATGCCAACCCTTCCCACCCCACTCTGTGGAACAAACTCTGAAACACAA
AATAAAATAAAGTTCAAGTGTTTTATTGATTCAACAGTTTTACAGGATTCGAGCAGTTATTTTTCCTCC
ACCCTCCCAGGACATGGAATACACCACCCTCTCCCCCCGCACAGCCTTGAACATCTGAATGCCATTGG
TGATGGACATGCTTTTGGTCTCCACGTTCCACACAGTTTCAGAGCGAGCCAGTCTCGGGTCGGTCAGG
GAGATGAAACCCTCCGGGCACTCCCGCATCTGCACCTCACAGCTCAACAGCTGAGGATTGTCCTCGGT
GGTCGGGATCACGGTTATCTGGAAGAAGCAGAAGAGCGGCGGTGGGAATCATAGTCCGCGAACGGG
ATCGGCCGGTGGTGTCGCATCAGGCCCCGCAGCAGTCGCTGCCGCCGCCGCTCCGTCAAGCTGCTGCT
CAGGGGGTCCGGGTCCAGGGACTCCCTCAGCATGATGCCCACGGCCCTCAGCATCAGTCGTCTGGTGC
GGCGGGCGCAGCAGCGCATGCGGATCTCGCTCAGGTCGCTGCAGTACGTGCAACACAGAACCACCAG
GTTGTTCAACAGTCCATAGTTCAACACGCTCCAGCCGAAACTCATCGCGGGAAGGATGCTACCCACGT
GGCCGTCGTACCAGATCCTCAGGTAAATCAAGTGGTGCCCCCTCCAGAACACGCTGCCCACGTACATG
ATCTCCTTGGGCATGTGGCGGTTCACCACCTCCCGGTACCACATCACCCTCTGGTTGAACATGCAGCC
CCGGATGATCCTGCGGAACCACAGGGCCAGCACCGCCCCGCCCGCCATGCAGCGAAGAGACCCCGGG
TCCCGGCAATGGCAATGGAGGACCCACCGCTCGTACCCGTGGATCATCTGGGAGCTGAACAAGTCTA
TGTTGGCACAGCACAGGCATATGCTCATGCATCTCTTCAGCACTCTCAACTCCTCGGGGGTCAAAACC
ATATCCCAGGGCACGGGGAACTCTTGCAGGACAGCGAACCCCGCAGAACAGGGCAATCCTCGCACAG
AACTTACATTGTGCATGGACAGGGTATCGCAATCAGGCAGCACCGGGTGATCCTCCACCAGAGAAGC
GCGGGTCTCGGTCTCCTCACAGCGTGGTAAGGGGGCCGGCCGATACGGGTGATGGCGGGACGCGGCT
GATCGTGTTCGCGACCGTGTCATGATGCAGTTGCTTTCGGACATTTTCGTACTTGCTGTAGCAGAACCT
GGTCCGGGCGCTGCACACCGATCGCCGGCGGCGGTCTCGGCGCTTGGAACGCTCGGTGTTGAAATTGT
AAAACAGCCACTCTCTCAGACCGTGCAGCAGATCTAGGGCCTCAGGAGTGATGAAGATCCCATCATG
CCTGATGGCTCTGATCACATCGACCACCGTGGAATGGGCCAGACCCAGCCAGATGATGCAATTTTGTT
GGGTTTCGGTGACGGCGGGGGAGGGAAGAACAGGAAGAACCATGATTAACTTTTAATCCAAACGGTC
TCGGAGTACTTCAAAATGAAGATCGCGGAGATGGCACCTCTCGCCCCCGCTGTGTTGGTGGAAAATA
ACAGCCAGGTCAAAGGTGATACGGTTCTCGAGATGTTCCACGGTGGCTTCCAGCAAAGCCTCCACGC
GCACATCCAGAAACAAGACAATAGCGAAAGCGGGAGGGTTCTCTAATTCCTCAATCATCATGTTACA
CTCCTGCACCATCCCCAGATAATTTTCATTTTTCCAGCCTTGAATGATTCGAACTAGTTCcTGAGGTAA
ATCCAAGCCAGCCATGATAAAGAGCTCGCGCAGAGCGCCCTCCACCGGCATTCTTAAGCACACCCTC
ATAATTCCAAGATATTCTGCTCCTGGTTCACCTGCAGCAGATTGACAAGCGGAATATCAAAATCTCTG
CCGCGATCCCTGAGCTCCTCCCTCAGCAATAACTGTAAGTACTCTTTCATATCCTCTCCGAAATTTTTA
GCCATAGGACCACCAGGAATAAGATTAGGGCAAGCCACAGTACAGATAAACCGAAGTCCTCCCCAGT
GAGCATTGCCAAATGCAAGACTGCTATAAGCATGCTGGCTAGACCCGGTGATATCTTCCAGATAACTG
GACAGAAAATCGCCCAGGCAATTTTTAAGAAAATCAACAAAAGAAAAATCCTCCAGGTGGACGTTTA
GAGCCTCGGGAACAACGATGAAGTAAATGCAAGCGGTGCGTTCCAGCATGGTTAGTTAGCTGATCTG
TAGAAAAAACAAAAATGAACATTAAACCATGCTAGCCTGGCGAACAGGTGGGTAAATCGTTCTCTCC
AGCACCAGGCAGGCCACGGGGTCTCCGGCGCGACCCTCGTAAAAATTGTCGCTATGATTGAAAACCA
TCACAGAGAGACGTTCCCGGTGGCCGGCGTGAATGATTCGACAAGATGAATACACCCCCGGAACATT
GGCGTCCGCGAGTGAAAAAAAGCGCCCGAGGAAGCAATAAGGCACTACAATGCTCAGTCTCAAGTCC
AGCAAAGCGATGCCATGCGGATGAAGCACAAAATTCTCAGGTGCGTACAAAATGTAATTACTCCCCT
CCTGCACAGGCAGCAAAGCCCCCGATCCCTCCAGGTACACATACAAAGCCTCAGCGTCCATAGCTTAC
CGAGCAGCAGCACACAACAGGCGCAAGAGTCAGAGAAAGGCTGAGCTCTAACCTGTCCACCCGCTCT
CTGCTCAATATATAGCCCAGATCTACACTGACGTAAAGGCCAAAGTCTAAAAATACCCGCCAAATAA
TCACACACGCCCAGCACACGCCCAGAAACCGGTGACACACTCAAAAAAATACGCGCACTTCCTCAAA
CGCCCAAAACTGCCGTCATTTCCGGGTTCCCACGCTACGTCATCAAAACACGACTTTCAAATTCCGTC
GACCGTTAAAAACGTCACCCGCCCCGCCCCTAACGGTCGCCCGTCTCTCAGCCAATCAGCGCCCCGCA
TCCCCAAATTCAAACACCTCATTTGCATATTAACGCGCACAAAAAGTTTGAGGTATATTATTGATGAT
GgTTAATTAA
chAd68.5WT-MAG-IRES- Tremelimumab (SEQ ID NO: 72); Tremelimumab sequence is in bold italic
CATCaTCAATAATATACCTCAAACTTTTTGTGCGCGTTAATATGCAAATGAGGCGTTTGAATTTGGGGA
GGAAGGGCGGTGATTGGTCGAGGGATGAGCGACCGTTAGGGGCGGGGCGAGTGACGTTTTGATGACG
TGGTTGCGAGGAGGAGCCAGTTTGCAAGTTCTCGTGGGAAAAGTGACGTCAAACGAGGTGTGGTTTG
AACACGGAAATACTCAATTTTCCCGCGCTCTCTGACAGGAAATGAGGTGTTTCTGGGCGGATGCAAGT
GAAAACGGGCCATTTTCGCGCGAAAACTGAATGAGGAAGTGAAAATCTGAGTAATTTCGCGTTTATG
GCAGGGAGGAGTATTTGCCGAGGGCCGAGTAGACTTTGACCGATTACGTGGGGGTTTCGATTACCGT
GTTTTTCACCTAAATTTCCGCGTACGGTGTCAAAGTCCGGTGTTTTTACGTAGGTGTCAGCTGATCGCC
AGGGTATTTAAACCTGCGCTCTCCAGTCAAGAGGCCACTCTTGAGTGCCAGCGAGAAGAGTTTTCTCC
TCCGCGCCGCGAGTCAGATCTACACTTTGAAAGTAGGGATAACAGGGTAATgacattgattattgactagttGttaaT
AGTAATCAATTACGGGGTCATTAGTTCATAGCCCATATATGGAGTTCCGCGTTACATAACTTACGGTA
AATGGCCCGCCTGGCTGACCGCCCAACGACCCCCGCCCATTGACGTCAATAATGACGTATGTTCCCAT
AGTAACGCCAATAGGGACTTTCCATTGACGTCAATGGGTGGAGTATTTACGGTAAACTGCCCACTTGG
CAGTACATCAAGTGTATCATATGCCAAGTCCGCCCCCTATTGACGTCAATGACGGTAAATGGCCCGCC
TGGCATTATGCCCAGTACATGACCTTACGGGACTTTCCTACTTGGCAGTACATCTACGTATTAGTCATC
GCTATTACCATGgTGATGCGGTTTTGGCAGTACACCAATGGGCGTGGATAGCGGTTTGACTCACGGGG
ATTTCCAAGTCTCCACCCCATTGACGTCAATGGGAGTTTGTTTTGGCACCAAAATCAACGGGACTTTC
CAAAATGTCGTAATAACCCCGCCCCGTTGACGCAAATGGGCGGTAGGCGTGTACGGTGGGAGGTCTA
TATAAGCAGAgcTCGTTTAGTGAACCGTCAGATCGCCTGGAACGCCATCCACGCTGTTTTGACCTCCAT
AGAAGACAGCGATCGCGccaccATGGCCGGGATGTTCCAGGCACTGTCCGAAGGCTGCACACCCTATGA
TATTAACCAGATGCTGAATGTCCTGGGAGACCACCAGGTCTCTGGCCTGGAGCAGCTGGAGAGCATC
ATCAACTTCGAGAAGCTGACCGAGTGGACAAGCTCCAATGTGATGCCTATCCTGTCCCCACTGACCAA
GGGCATCCTGGGCTTCGTGTTTACCCTGACAGTGCCTTCTGAGCGGGGCCTGTCTTGCATCAGCGAGG
CAGACGCAACCACACCAGAGTCCGCCAATCTGGGCGAGGAGATCCTGTCTCAGCTGTACCTGTGGCC
CCGGGTGACATATCACTCCCCTTCTTACGCCTATCACCAGTTCGAGCGGAGAGCCAAGTACAAGAGAC
ACTTCCCAGGCTTTGGCCAGTCTCTGCTGTTCGGCTACCCCGTGTACGTGTTCGGCGATTGCGTGCAGG
GCGACTGGGATGCCATCCGGTTTAGATACTGCGCACCACCTGGATATGCACTGCTGAGGTGTAACGAC
ACCAATTATTCCGCCCTGCTGGCAGTGGGCGCCCTGGAGGGCCCTCGCAATCAGGATTGGCTGGGCGT
GCCAAGGCAGCTGGTGACACGCATGCAGGCCATCCAGAACGCAGGCCTGTGCACCCTGGTGGCAATG
CTGGAGGAGACAATCTTCTGGCTGCAGGCCTTTCTGATGGCCCTGACCGACAGCGGCCCCAAGACAA
ACATCATCGTGGATTCCCAGTACGTGATGGGCATCTCCAAGCCTTCTTTCCAGGAGTTTGTGGACTGG
GAGAACGTGAGCCCAGAGCTGAATTCCACCGATCAGCCATTCTGGCAGGCAGGAATCCTGGCAAGGA
ACCTGGTGCCTATGGTGGCCACAGTGCAGGGCCAGAATCTGAAGTACCAGGGCCAGAGCCTGGTCAT
CAGCGCCTCCATCATCGTGTTTAACCTGCTGGAGCTGGAGGGCGACTATCGGGACGATGGCAACGTGT
GGGTGCACACCCCACTGAGCCCCAGAACACTGAACGCCTGGGTGAAGGCCGTGGAGGAGAAGAAGG
GCATCCCAGTGCACCTGGAGCTGGCCTCCATGACCAATATGGAGCTGATGTCTAGCATCGTGCACCAG
CAGGTGAGGACATACGGACCCGTGTTCATGTGCCTGGGAGGCCTGCTGACCATGGTGGCAGGAGCCG
TGTGGCTGACAGTGCGGGTGCTGGAGCTGTTCAGAGCCGCCCAGCTGGCCAACGATGTGGTGCTGCA
GATCATGGAGCTGTGCGGAGCAGCCTTTCGCCAGGTGTGCCACACCACAGTGCCATGGCCCAATGCCT
CCCTGACCCCCAAGTGGAACAATGAGACAACACAGCCTCAGATCGCCAACTGTAGCGTGTACGACTT
CTTCGTGTGGCTGCACTACTATAGCGTGAGGGATACCCTGTGGCCCCGCGTGACATACCACATGAATA
AGTACGCCTATCACATGCTGGAGAGGCGCGCCAAGTATAAGAGAGGCCCTGGCCCAGGCGCAAAGTT
TGTGGCAGCATGGACCCTGAAGGCCGCCGCCGGCCCCGGCCCCGGCCAGTATATCAAGGCTAACAGT
AAGTTCATTGGAATCACAGAGCTGGGACCCGGACCTGGATAATGAGTTTAAACcgttactggccgaagccgcttgg
aataaggccggtgtgcgtttgtctatatgttattttccaccatattgccgtcttttggcaatgtgagggcccggaaacctggccctgtcttcttgacga
gcattcctaggggtctttcccctctcgccaaaggaatgcaaggtctgagaatgtcgtgaaggaagcagttcctctggaagcttcttgaagacaaacaac
gtctgtagcgaccctttgcaggcagcggaaccccccacctggcgacaggtgcctctgcggccaaaagccacgtgtataagatacacctgcaaaggcggc
gacaaccccagtgccacgttgtgagttggatagtttggaaagagtcaaatggctctcctcaagcgtattcaacaaggggctgaaggatgcccagaaggt
accccattgtatgggatctgatctggggcctcggtgcacatgctttacatgtgtttagtcgaggttaaaaaacgtctaggccccccgaaccacggggac
gtggttttcctttgaaaaacacgatgataatATGGGCTGGTCCTGCATCATCCTGTTTCTGGTGGCTACAGCCACAGGCGTGCACTCTCAGGTGCAAC
TGGTTGAATCTGGTGGCGGAGTGGTGCAGCCTGGCAGATCTCTGAGACTGTCTTGTGCTGCCAGCGGCTTCACCTT
CAGCAGCTATGGCATGCACTGGGTTCGACAGGCCCCTGGCAAAGGACTGGAATGGGTTGCCGT
GATTTGGTACGACGGCAGCAACAAGTACTACGCCGACAGCGTGAAGGGCAGATTCACCATCTC
CAGAGACAACAGCAAGAACACCCTGTACCTGCAGATGAACAGCCTGAGAGCCGAGGACACCGC
CGTGTACTATTGCGCTAGAGATCCTAGAGGCGCCACACTGTACTACTACTATTACGGCATGGAC
GTGTGGGGCCAGGGCACCACAGTTACAGTGTCTAGCGCCTCTACAAAGGGCCCCTCCGTTTTTC
CTCTGGCTCCTTGTTCTAGAAGCACCAGCGAGTCTACAGCCGCTCTGGGCTGTCTGGTCAAGGA
CTACTTTCCTGAGCCTGTGACCGTGTCCTGGAATTCTGGTGCTCTGACAAGCGGCGTGCACACC
TTTCCAGCCGTGCTGCAAAGCAGCGGCCTGTACTCTCTGTCTAGCGTGGTCACCGTGCCTAGCA
GCAATTTCGGCACCCAGACCTACACCTGTAACGTGGACCACAAGCCTAGCAACACCAAGGTGGA
CAAGACCGTGGAACGGAAGTGCTGCGTGGAATGCCCTCCTTGTCCTGCTCCTCCAGTGGCCGG
ACCTTCCGTGTTTCTGTTCCCTCCAAAGCCTAAGGACACCCTGATGATCAGCAGAACCCCTGAA
GTGACCTGCGTGGTGGTGGATGTGTCTCACGAGGATCCCGAGGTGCAGTTCAATTGGTACGTG
GACGGCGTGGAAGTGCACAACGCCAAGACCAAGCCTAGAGAGGAACAGTTCAACTCCACCTTC
AGAGTGGTGTCCGTGCTGACCGTGGTGCATCAGGACTGGCTGAACGGCAAAGAGTACAAGTGC
AAGGTGTCCAACAAGGGCCTGCCTGCTCCTATCGAGAAAACCATCAGCAAGACCAAAGGCCAG
CCTCGCGAGCCTCAGGTTTACACACTGCCTCCAAGCCGGGAAGAGATGACCAAGAATCAGGTG
TCCCTGACCTGCCTGGTTAAGGGCTTCTACCCCAGCGACATCTCCGTGGAATGGGAGTCTAATG
GCCAGCCAGAGAACAACTACAAGACCACACCTCCTATGCTGGACTCCGATGGCTCATTCTTCCT
GTACAGCAAGCTGACAGTGGACAAGTCCAGATGGCAGCAGGGCAACGTGTTCAGCTGTTCTGT
GATGCACGAGGCCCTGCACAACCACTACACCCAGAAGTCTCTGTCTCTGAGCCCCGGCAAACG
GAAGAGAAGAGGCGTTAGAGCCGAAGGCAGAGGCTCTCTGCTGACATGCGGAGATGTGGAAGA
GAACCCCGGACCTATGGACATGAGAGTGCCTGCTCAACTGCTGGGACTGCTGCTTCTTTGGCTG
CCTGGCGCTAGATGCGACATCCAGATGACACAGAGCCCTAGCAGCCTGTCTGCCTCTGTGGGC
GATAGAGTGACCATCACCTGTCGGGCCTCTCAGAGCATCAACAGCTACCTGGACTGGTATCAGC
AAAAGCCCGGCAAGGCCCCTAAGCTGCTGATCTATGCCGCTAGCTCTCTGCAGTCTGGCGTGCC
AAGCAGATTTTCTGGCAGCGGCTCTGGCACCGACTTCACCCTGACAATTTCTAGCCTGCAGCCT
GAGGACTTCGCCACCTACTACTGCCAGCAGTACTACAGCACCCCTTTCACATTCGGCCCTGGCA
CAAAGGTGGAAATCAAGAGAACAGTGGCCGCTCCGAGCGTGTTCATCTTTCCACCTAGCGACGA
GCAGCTGAAAAGCGGCACAGCCTCTGTCGTGTGCCTGCTGAACAACTTCTACCCTCGGGAAGCC
AAGGTGCAGTGGAAAGTGGATAATGCCCTGCAGAGCGGCAACAGCCAAGAGAGCGTGACAGAG
CAGGATAGCAAGGACAGCACCTATAGCCTGAGCAGCACACTGACCCTGAGCAAGGCCGACTAC
GAGAAGCACAAGGTGTACGCCTGCGAAGTGACACACCAGGGACTGAGCAGCCCTGTGACCAAG
AGCTTCAACAGAGGCGAGTGCTGATAGATTTAAATGTGAGGGTTAATGCTTCGAGCAGACATGATA
AGATACATTGATGAGTTTGGACAAACCACAACTAGAATGCAGTGAAAAAAATGCTTTATTTGTGAAA
TTTGTGATGCTATTGCTTTATTTGTAACCATTATAAGCTGCAATAAACAAGTTAACAACAACAATTGC
ATTCATTTTATGTTTCAGGTTCAGGGGGAGATGTGGGAGGTTTTTTAAAGCAAGTAAAACCTCTACAA
ATGTGGTAAAATAACTATAACGGTCCTAAGGTAGCGAGTGAGTAGTGTTCTGGGGCGGGGGAGGACC
TGCATGAGGGCCAGAATAACTGAAATCTGTGCTTTTCTGTGTGTTGCAGCAGCATGAGCGGAAGCGGC
TCCTTTGAGGGAGGGGTATTCAGCCCTTATCTGACGGGGCGTCTCCCCTCCTGGGCGGGAGTGCGTCA
GAATGTGATGGGATCCACGGTGGACGGCCGGCCCGTGCAGCCCGCGAACTCTTCAACCCTGACCTAT
GCAACCCTGAGCTCTTCGTCGTTGGACGCAGCTGCCGCCGCAGCTGCTGCATCTGCCGCCAGCGCCGT
GCGCGGAATGGCCATGGGCGCCGGCTACTACGGCACTCTGGTGGCCAACTCGAGTTCCACCAATAAT
CCCGCCAGCCTGAACGAGGAGAAGCTGTTGCTGCTGATGGCCCAGCTCGAGGCCTTGACCCAGCGCC
TGGGCGAGCTGACCCAGCAGGTGGCTCAGCTGCAGGAGCAGACGCGGGCCGCGGTTGCCACGGTGAA
ATCCAAATAAAAAATGAATCAATAAATAAACGGAGACGGTTGTTGATTTTAACACAGAGTCTGAATC
TTTATTTGATTTTTCGCGCGCGGTAGGCCCTGGACCACCGGTCTCGATCATTGAGCACCCGGTGGATCT
TTTCCAGGACCCGGTAGAGGTGGGCTTGGATGTTGAGGTACATGGGCATGAGCCCGTCCCGGGGGTG
GAGGTAGCTCCATTGCAGGGCCTCGTGCTCGGGGGTGGTGTTGTAAATCACCCAGTCATAGCAGGGG
CGCAGGGCATGGTGTTGCACAATATCTTTGAGGAGGAGACTGATGGCCACGGGCAGCCCTTTGGTGT
AGGTGTTTACAAATCTGTTGAGCTGGGAGGGATGCATGCGGGGGGAGATGAGGTGCATCTTGGCCTG
GATCTTGAGATTGGCGATGTTACCGCCCAGATCCCGCCTGGGGTTCATGTTGTGCAGGACCACCAGCA
CGGTGTATCCGGTGCACTTGGGGAATTTATCATGCAACTTGGAAGGGAAGGCGTGAAAGAATTTGGC
GACGCCTTTGTGCCCGCCCAGGTTTTCCATGCACTCATCCATGATGATGGCGATGGGCCCGTGGGCGG
CGGCCTGGGCAAAGACGTTTCGGGGGTCGGACACATCATAGTTGTGGTCCTGGGTGAGGTCATCATA
GGCCATTTTAATGAATTTGGGGCGGAGGGTGCCGGACTGGGGGACAAAGGTACCCTCGATCCCGGGG
GCGTAGTTCCCCTCACAGATCTGCATCTCCCAGGCTTTGAGCTCGGAGGGGGGGATCATGTCCACCTG
CGGGGCGATAAAGAACACGGTTTCCGGGGCGGGGGAGATGAGCTGGGCCGAAAGCAAGTTCCGGAG
CAGCTGGGACTTGCCGCAGCCGGTGGGGCCGTAGATGACCCCGATGACCGGCTGCAGGTGGTAGTTG
AGGGAGAGACAGCTGCCGTCCTCCCGGAGGAGGGGGGCCACCTCGTTCATCATCTCGCGCACGTGCA
TGTTCTCGCGCACCAGTTCCGCCAGGAGGCGCTCTCCCCCCAGGGATAGGAGCTCCTGGAGCGAGGC
GAAGTTTTTCAGCGGCTTGAGTCCGTCGGCCATGGGCATTTTGGAGAGGGTTTGTTGCAAGAGTTCCA
GGCGGTCCCAGAGCTCGGTGATGTGCTCTACGGCATCTCGATCCAGCAGACCTCCTCGTTTCGCGGGT
TGGGACGGCTGCGGGAGTAGGGCACCAGACGATGGGCGTCCAGCGCAGCCAGGGTCCGGTCCTTCCA
GGGTCGCAGCGTCCGCGTCAGGGTGGTCTCCGTCACGGTGAAGGGGTGCGCGCCGGGCTGGGCGCTT
GCGAGGGTGCGCTTCAGGCTCATCCGGCTGGTCGAAAACCGCTCCCGATCGGCGCCCTGCGCGTCGGC
CAGGTAGCAATTGACCATGAGTTCGTAGTTGAGCGCCTCGGCCGCGTGGCCTTTGGCGCGGAGCTTAC
CTTTGGAAGTCTGCCCGCAGGCGGGACAGAGGAGGGACTTGAGGGCGTAGAGCTTGGGGGCGAGGA
AGACGGACTCGGGGGCGTAGGCGTCCGCGCCGCAGTGGGCGCAGACGGTCTCGCACTCCACGAGCCA
GGTGAGGTCGGGCTGGTCGGGGTCAAAAACCAGTTTCCCGCCGTTCTTTTTGATGCGTTTCTTACCTTT
GGTCTCCATGAGCTCGTGTCCCCGCTGGGTGACAAAGAGGCTGTCCGTGTCCCCGTAGACCGACTTTA
TGGGCCGGTCCTCGAGCGGTGTGCCGCGGTCCTCCTCGTAGAGGAACCCCGCCCACTCCGAGACGAA
AGCCCGGGTCCAGGCCAGCACGAAGGAGGCCACGTGGGACGGGTAGCGGTCGTTGTCCACCAGCGGG
TCCACCTTTTCCAGGGTATGCAAACACATGTCCCCCTCGTCCACATCCAGGAAGGTGATTGGCTTGTA
AGTGTAGGCCACGTGACCGGGGGTCCCGGCCGGGGGGGTATAAAAGGGTGCGGGTCCCTGCTCGTCC
TCACTGTCTTCCGGATCGCTGTCCAGGAGCGCCAGCTGTTGGGGTAGGTATTCCCTCTCGAAGGCGGG
CATGACCTCGGCACTCAGGTTGTCAGTTTCTAGAAACGAGGAGGATTTGATATTGACGGTGCCGGCGG
AGATGCCTTTCAAGAGCCCCTCGTCCATCTGGTCAGAAAAGACGATCTTTTTGTTGTCGAGCTTGGTG
GCGAAGGAGCCGTAGAGGGCGTTGGAGAGGAGCTTGGCGATGGAGCGCATGGTCTGGTTTTTTTCCTT
GTCGGCGCGCTCCTTGGCGGCGATGTTGAGCTGCACGTACTCGCGCGCCACGCACTTCCATTCGGGGA
AGACGGTGGTCAGCTCGTCGGGCACGATTCTGACCTGCCAGCCCCGATTATGCAGGGTGATGAGGTCC
ACACTGGTGGCCACCTCGCCGCGCAGGGGCTCATTAGTCCAGCAGAGGCGTCCGCCCTTGCGCGAGC
AGAAGGGGGGCAGGGGGTCCAGCATGACCTCGTCGGGGGGGTCGGCATCGATGGTGAAGATGCCGG
GCAGGAGGTCGGGGTCAAAGTAGCTGATGGAAGTGGCCAGATCGTCCAGGGCAGCTTGCCATTCGCG
CACGGCCAGCGCGCGCTCGTAGGGACTGAGGGGCGTGCCCCAGGGCATGGGATGGGTAAGCGCGGA
GGCGTACATGCCGCAGATGTCGTAGACGTAGAGGGGCTCCTCGAGGATGCCGATGTAGGTGGGGTAG
CAGCGCCCCCCGCGGATGCTGGCGCGCACGTAGTCATACAGCTCGTGCGAGGGGGCGAGGAGCCCCG
GGCCCAGGTTGGTGCGACTGGGCTTTTCGGCGCGGTAGACGATCTGGCGGAAAATGGCATGCGAGTT
GGAGGAGATGGTGGGCCTTTGGAAGATGTTGAAGTGGGCGTGGGGCAGTCCGACCGAGTCGCGGATG
AAGTGGGCGTAGGAGTCTTGCAGCTTGGCGACGAGCTCGGCGGTGACTAGGACGTCCAGAGCGCAGT
AGTCGAGGGTCTCCTGGATGATGTCATACTTGAGCTGTCCCTTTTGTTTCCACAGCTCGCGGTTGAGAA
GGAACTCTTCGCGGTCCTTCCAGTACTCTTCGAGGGGGAACCCGTCCTGATCTGCACGGTAAGAGCCT
AGCATGTAGAACTGGTTGACGGCCTTGTAGGCGCAGCAGCCCTTCTCCACGGGGAGGGCGTAGGCCT
GGGCGGCCTTGCGCAGGGAGGTGTGCGTGAGGGCGAAAGTGTCCCTGACCATGACCTTGAGGAACTG
GTGCTTGAAGTCGATATCGTCGCAGCCCCCCTGCTCCCAGAGCTGGAAGTCCGTGCGCTTCTTGTAGG
CGGGGTTGGGCAAAGCGAAAGTAACATCGTTGAAGAGGATCTTGCCCGCGCGGGGCATAAAGTTGCG
AGTGATGCGGAAAGGTTGGGGCACCTCGGCCCGGTTGTTGATGACCTGGGCGGCGAGCACGATCTCG
TCGAAGCCGTTGATGTTGTGGCCCACGATGTAGAGTTCCACGAATCGCGGACGGCCCTTGACGTGGGG
CAGTTTCTTGAGCTCCTCGTAGGTGAGCTCGTCGGGGTCGCTGAGCCCGTGCTGCTCGAGCGCCCAGT
CGGCGAGATGGGGGTTGGCGCGGAGGAAGGAAGTCCAGAGATCCACGGCCAGGGCGGTTTGCAGAC
GGTCCCGGTACTGACGGAACTGCTGCCCGACGGCCATTTTTTCGGGGGTGACGCAGTAGAAGGTGCG
GGGGTCCCCGTGCCAGCGATCCCATTTGAGCTGGAGGGCGAGATCGAGGGCGAGCTCGACGAGCCGG
TCGTCCCCGGAGAGTTTCATGACCAGCATGAAGGGGACGAGCTGCTTGCCGAAGGACCCCATCCAGG
TGTAGGTTTCCACATCGTAGGTGAGGAAGAGCCTTTCGGTGCGAGGATGCGAGCCGATGGGGAAGAA
CTGGATCTCCTGCCACCAATTGGAGGAATGGCTGTTGATGTGATGGAAGTAGAAATGCCGACGGCGC
GCCGAACACTCGTGCTTGTGTTTATACAAGCGGCCACAGTGCTCGCAACGCTGCACGGGATGCACGTG
CTGCACGAGCTGTACCTGAGTTCCTTTGACGAGGAATTTCAGTGGGAAGTGGAGTCGTGGCGCCTGCA
TCTCGTGCTGTACTACGTCGTGGTGGTCGGCCTGGCCCTCTTCTGCCTCGATGGTGGTCATGCTGACGA
GCCCGCGCGGGAGGCAGGTCCAGACCTCGGCGCGAGCGGGTCGGAGAGCGAGGACGAGGGCGCGCA
GGCCGGAGCTGTCCAGGGTCCTGAGACGCTGCGGAGTCAGGTCAGTGGGCAGCGGCGGCGCGCGGTT
GACTTGCAGGAGTTTTTCCAGGGCGCGCGGGAGGTCCAGATGGTACTTGATCTCCACCGCGCCATTGG
TGGCGACGTCGATGGCTTGCAGGGTCCCGTGCCCCTGGGGTGTGACCACCGTCCCCCGTTTCTTCTTG
GGCGGCTGGGGCGACGGGGGCGGTGCCTCTTCCATGGTTAGAAGCGGCGGCGAGGACGCGCGCCGGG
CGGCAGGGGCGGCTCGGGGCCCGGAGGCAGGGGCGGCAGGGGCACGTCGGCGCCGCGCGCGGGTAG
GTTCTGGTACTGCGCCCGGAGAAGACTGGCGTGAGCGACGACGCGACGGTTGACGTCCTGGATCTGA
CGCCTCTGGGTGAAGGCCACGGGACCCGTGAGTTTGAACCTGAAAGAGAGTTCGACAGAATCAATCT
CGGTATCGTTGACGGCGGCCTGCCGCAGGATCTCTTGCACGTCGCCCGAGTTGTCCTGGTAGGCGATC
TCGGTCATGAACTGCTCGATCTCCTCCTCTTGAAGGTCTCCGCGGCCGGCGCGCTCCACGGTGGCCGC
GAGGTCGTTGGAGATGCGGCCCATGAGCTGCGAGAAGGCGTTCATGCCCGCCTCGTTCCAGACGCGG
CTGTAGACCACGACGCCCTCGGGATCGCgGGCGCGCATGACCACCTGGGCGAGGTTGAGCTCCACGTG
GCGCGTGAAGACCGCGTAGTTGCAGAGGCGCTGGTAGAGGTAGTTGAGCGTGGTGGCGATGTGCTCG
GTGACGAAGAAATACATGATCCAGCGGCGGAGCGGCATCTCGCTGACGTCGCCCAGCGCCTCCAAAC
GTTCCATGGCCTCGTAAAAGTCCACGGCGAAGTTGAAAAACTGGGAGTTGCGCGCCGAGACGGTCAA
CTCCTCCTCCAGAAGACGGATGAGCTCGGCGATGGTGGCGCGCACCTCGCGCTCGAAGGCCCCCGGG
AGTTCCTCCACTTCCTCTTCTTCCTCCTCCACTAACATCTCTTCTACTTCCTCCTCAGGCGGCAGTGGTG
GCGGGGGAGGGGGCCTGCGTCGCCGGCGGCGCACGGGCAGACGGTCGATGAAGCGCTCGATGGTCTC
GCCGCGCCGGCGTCGCATGGTCTCGGTGACGGCGCGCCCGTCCTCGCGGGGCCGCAGCGTGAAGACG
CCGCCGCGCATCTCCAGGTGGCCGGGGGGGTCCCCGTTGGGCAGGGAGAGGGCGCTGACGATGCATC
TTATCAATTGCCCCGTAGGGACTCCGCGCAAGGACCTGAGCGTCTCGAGATCCACGGGATCTGAAAA
CCGCTGAACGAAGGCTTCGAGCCAGTCGCAGTCGCAAGGTAGGCTGAGCACGGTTTCTTCTGGCGGG
TCATGTTGGTTGGGAGCGGGGCGGGCGATGCTGCTGGTGATGAAGTTGAAATAGGCGGTTCTGAGAC
GGCGGATGGTGGCGAGGAGCACCAGGTCTTTGGGCCCGGCTTGCTGGATGCGCAGACGGTCGGCCAT
GCCCCAGGCGTGGTCCTGACACCTGGCCAGGTCCTTGTAGTAGTCCTGCATGAGCCGCTCCACGGGCA
CCTCCTCCTCGCCCGCGCGGCCGTGCATGCGCGTGAGCCCGAAGCCGCGCTGGGGCTGGACGAGCGC
CAGGTCGGCGACGACGCGCTCGGCGAGGATGGCTTGCTGGATCTGGGTGAGGGTGGTCTGGAAGTCA
TCAAAGTCGACGAAGCGGTGGTAGGCTCCGGTGTTGATGGTGTAGGAGCAGTTGGCCATGACGGACC
AGTTGACGGTCTGGTGGCCCGGACGCACGAGCTCGTGGTACTTGAGGCGCGAGTAGGCGCGCGTGTC
GAAGATGTAGTCGTTGCAGGTGCGCACCAGGTACTGGTAGCCGATGAGGAAGTGCGGCGGCGGCTGG
CGGTAGAGCGGCCATCGCTCGGTGGCGGGGGCGCCGGGCGCGAGGTCCTCGAGCATGGTGCGGTGGT
AGCCGTAGATGTACCTGGACATCCAGGTGATGCCGGCGGCGGTGGTGGAGGCGCGCGGGAACTCGCG
GACGCGGTTCCAGATGTTGCGCAGCGGCAGGAAGTAGTTCATGGTGGGCACGGTCTGGCCCGTGAGG
CGCGCGCAGTCGTGGATGCTCTATACGGGCAAAAACGAAAGCGGTCAGCGGCTCGACTCCGTGGCCT
GGAGGCTAAGCGAACGGGTTGGGCTGCGCGTGTACCCCGGTTCGAATCTCGAATCAGGCTGGAGCCG
CAGCTAACGTGGTATTGGCACTCCCGTCTCGACCCAAGCCTGCACCAACCCTCCAGGATACGGAGGCG
GGTCGTTTTGCAACTTTTTTTTGGAGGCCGGATGAGACTAGTAAGCGCGGAAAGCGGCCGACCGCGAT
GGCTCGCTGCCGTAGTCTGGAGAAGAATCGCCAGGGTTGCGTTGCGGTGTGCCCCGGTTCGAGGCCG
GCCGGATTCCGCGGCTAACGAGGGCGTGGCTGCCCCGTCGTTTCCAAGACCCCATAGCCAGCCGACTT
CTCCAGTTACGGAGCGAGCCCCTCTTTTGTTTTGTTTGTTTTTGCCAGATGCATCCCGTACTGCGGCAG
ATGCGCCCCCACCACCCTCCACCGCAACAACAGCCCCCTCCACAGCCGGCGCTTCTGCCCCCGCCCCA
GCAGCAACTTCCAGCCACGACCGCCGCGGCCGCCGTGAGCGGGGCTGGACAGAGTTATGATCACCAG
CTGGCCTTGGAAGAGGGCGAGGGGCTGGCGCGCCTGGGGGCGTCGTCGCCGGAGCGGCACCCGCGCG
TGCAGATGAAAAGGGACGCTCGCGAGGCCTACGTGCCCAAGCAGAACCTGTTCAGAGACAGGAGCG
GCGAGGAGCCCGAGGAGATGCGCGCGGCCCGGTTCCACGCGGGGCGGGAGCTGCGGCGCGGCCTGG
ACCGAAAGAGGGTGCTGAGGGACGAGGATTTCGAGGCGGACGAGCTGACGGGGATCAGCCCCGCGC
GCGCGCACGTGGCCGCGGCCAACCTGGTCACGGCGTACGAGCAGACCGTGAAGGAGGAGAGCAACTT
CCAAAAATCCTTCAACAACCACGTGCGCACCCTGATCGCGCGCGAGGAGGTGACCCTGGGCCTGATG
CACCTGTGGGACCTGCTGGAGGCCATCGTGCAGAACCCCACCAGCAAGCCGCTGACGGCGCAGCTGT
TCCTGGTGGTGCAGCATAGTCGGGACAACGAAGCGTTCAGGGAGGCGCTGCTGAATATCACCGAGCC
CGAGGGCCGCTGGCTCCTGGACCTGGTGAACATTCTGCAGAGCATCGTGGTGCAGGAGCGCGGGCTG
CCGCTGTCCGAGAAGCTGGCGGCCATCAACTTCTCGGTGCTGAGTTTGGGCAAGTACTACGCTAGGAA
GATCTACAAGACCCCGTACGTGCCCATAGACAAGGAGGTGAAGATCGACGGGTTTTACATGCGCATG
ACCCTGAAAGTGCTGACCCTGAGCGACGATCTGGGGGTGTACCGCAACGACAGGATGCACCGTGCGG
TGAGCGCCAGCAGGCGGCGCGAGCTGAGCGACCAGGAGCTGATGCATAGTCTGCAGCGGGCCCTGAC
CGGGGCCGGGACCGAGGGGGAGAGCTACTTTGACATGGGCGCGGACCTGCACTGGCAGCCCAGCCGC
CGGGCCTTGGAGGCGGCGGCAGGACCCTACGTAGAAGAGGTGGACGATGAGGTGGACGAGGAGGGC
GAGTACCTGGAAGACTGATGGCGCGACCGTATTTTTGCTAGATGCAACAACAACAGCCACCTCCTGAT
CCCGCGATGCGGGCGGCGCTGCAGAGCCAGCCGTCCGGCATTAACTCCTCGGACGATTGGACCCAGG
CCATGCAACGCATCATGGCGCTGACGACCCGCAACCCCGAAGCCTTTAGACAGCAGCCCCAGGCCAA
CCGGCTCTCGGCCATCCTGGAGGCCGTGGTGCCCTCGCGCTCCAACCCCACGCACGAGAAGGTCCTGG
CCATCGTGAACGCGCTGGTGGAGAACAAGGCCATCCGCGGCGACGAGGCCGGCCTGGTGTACAACGC
GCTGCTGGAGCGCGTGGCCCGCTACAACAGCACCAACGTGCAGACCAACCTGGACCGCATGGTGACC
GACGTGCGCGAGGCCGTGGCCCAGCGCGAGCGGTTCCACCGCGAGTCCAACCTGGGATCCATGGTGG
CGCTGAACGCCTTCCTCAGCACCCAGCCCGCCAACGTGCCCCGGGGCCAGGAGGACTACACCAACTT
CATCAGCGCCCTGCGCCTGATGGTGACCGAGGTGCCCCAGAGCGAGGTGTACCAGTCCGGGCCGGAC
TACTTCTTCCAGACCAGTCGCCAGGGCTTGCAGACCGTGAACCTGAGCCAGGCTTTCAAGAACTTGCA
GGGCCTGTGGGGCGTGCAGGCCCCGGTCGGGGACCGCGCGACGGTGTCGAGCCTGCTGACGCCGAAC
TCGCGCCTGCTGCTGCTGCTGGTGGCCCCCTTCACGGACAGCGGCAGCATCAACCGCAACTCGTACCT
GGGCTACCTGATTAACCTGTACCGCGAGGCCATCGGCCAGGCGCACGTGGACGAGCAGACCTACCAG
GAGATCACCCACGTGAGCCGCGCCCTGGGCCAGGACGACCCGGGCAACCTGGAAGCCACCCTGAACT
TTTTGCTGACCAACCGGTCGCAGAAGATCCCGCCCCAGTACGCGCTCAGCACCGAGGAGGAGCGCAT
CCTGCGTTACGTGCAGCAGAGCGTGGGCCTGTTCCTGATGCAGGAGGGGGCCACCCCCAGCGCCGCG
CTCGACATGACCGCGCGCAACATGGAGCCCAGCATGTACGCCAGCAACCGCCCGTTCATCAATAAAC
TGATGGACTACTTGCATCGGGCGGCCGCCATGAACTCTGACTATTTCACCAACGCCATCCTGAATCCC
CACTGGCTCCCGCCGCCGGGGTTCTACACGGGCGAGTACGACATGCCCGACCCCAATGACGGGTTCCT
GTGGGACGATGTGGACAGCAGCGTGTTCTCCCCCCGACCGGGTGCTAACGAGCGCCCCTTGTGGAAG
AAGGAAGGCAGCGACCGACGCCCGTCCTCGGCGCTGTCCGGCCGCGAGGGTGCTGCCGCGGCGGTGC
CCGAGGCCGCCAGTCCTTTCCCGAGCTTGCCCTTCTCGCTGAACAGTATCCGCAGCAGCGAGCTGGGC
AGGATCACGCGCCCGCGCTTGCTGGGCGAAGAGGAGTACTTGAATGACTCGCTGTTGAGACCCGAGC
GGGAGAAGAACTTCCCCAATAACGGGATAGAAAGCCTGGTGGACAAGATGAGCCGCTGGAAGACGT
ATGCGCAGGAGCACAGGGACGATCCCCGGGCGTCGCAGGGGGCCACGAGCCGGGGCAGCGCCGCCC
GTAAACGCCGGTGGCACGACAGGCAGCGGGGACAGATGTGGGACGATGAGGACTCCGCCGACGACA
GCAGCGTGTTGGACTTGGGTGGGAGTGGTAACCCGTTCGCTCACCTGCGCCCCCGTATCGGGCGCATG
ATGTAAGAGAAACCGAAAATAAATGATACTCACCAAGGCCATGGCGACCAGCGTGCGTTCGTTTCTT
CTCTGTTGTTGTTGTATCTAGTATGATGAGGCGTGCGTACCCGGAGGGTCCTCCTCCCTCGTACGAGA
GCGTGATGCAGCAGGCGATGGCGGCGGCGGCGATGCAGCCCCCGCTGGAGGCTCCTTACGTGCCCCC
GCGGTACCTGGCGCCTACGGAGGGGCGGAACAGCATTCGTTACTCGGAGCTGGCACCCTTGTACGAT
ACCACCCGGTTGTACCTGGTGGACAACAAGTCGGCGGACATCGCCTCGCTGAACTACCAGAACGACC
ACAGCAACTTCCTGACCACCGTGGTGCAGAACAATGACTTCACCCCCACGGAGGCCAGCACCCAGAC
CATCAACTTTGACGAGCGCTCGCGGTGGGGCGGCCAGCTGAAAACCATCATGCACACCAACATGCCC
AACGTGAACGAGTTCATGTACAGCAACAAGTTCAAGGCGCGGGTGATGGTCTCCCGCAAGACCCCCA
ATGGGGTGACAGTGACAGAGGATTATGATGGTAGTCAGGATGAGCTGAAGTATGAATGGGTGGAATT
TGAGCTGCCCGAAGGCAACTTCTCGGTGACCATGACCATCGACCTGATGAACAACGCCATCATCGAC
AATTACTTGGCGGTGGGGCGGCAGAACGGGGTGCTGGAGAGCGACATCGGCGTGAAGTTCGACACTA
GGAACTTCAGGCTGGGCTGGGACCCCGTGACCGAGCTGGTCATGCCCGGGGTGTACACCAACGAGGC
TTTCCATCCCGATATTGTCTTGCTGCCCGGCTGCGGGGTGGACTTCACCGAGAGCCGCCTCAGCAACC
TGCTGGGCATTCGCAAGAGGCAGCCCTTCCAGGAAGGCTTCCAGATCATGTACGAGGATCTGGAGGG
GGGCAACATCCCCGCGCTCCTGGATGTCGACGCCTATGAGAAAAGCAAGGAGGATGCAGCAGCTGAA
GCAACTGCAGCCGTAGCTACCGCCTCTACCGAGGTCAGGGGCGATAATTTTGCAAGCGCCGCAGCAG
TGGCAGCGGCCGAGGCGGCTGAAACCGAAAGTAAGATAGTCATTCAGCCGGTGGAGAAGGATAGCA
AGAACAGGAGCTACAACGTACTACCGGACAAGATAAACACCGCCTACCGCAGCTGGTACCTAGCCTA
CAACTATGGCGACCCCGAGAAGGGCGTGCGCTCCTGGACGCTGCTCACCACCTCGGACGTCACCTGC
GGCGTGGAGCAAGTCTACTGGTCGCTGCCCGACATGATGCAAGACCCGGTCACCTTCCGCTCCACGCG
TCAAGTTAGCAACTACCCGGTGGTGGGCGCCGAGCTCCTGCCCGTCTACTCCAAGAGCTTCTTCAACG
AGCAGGCCGTCTACTCGCAGCAGCTGCGCGCCTTCACCTCGCTTACGCACGTCTTCAACCGCTTCCCC
GAGAACCAGATCCTCGTCCGCCCGCCCGCGCCCACCATTACCACCGTCAGTGAAAACGTTCCTGCTCT
CACAGATCACGGGACCCTGCCGCTGCGCAGCAGTATCCGGGGAGTCCAGCGCGTGACCGTTACTGAC
GCCAGACGCCGCACCTGCCCCTACGTCTACAAGGCCCTGGGCATAGTCGCGCCGCGCGTCCTCTCGAG
CCGCACCTTCTAAATGTCCATTCTCATCTCGCCCAGTAATAACACCGGTTGGGGCCTGCGCGCGCCCA
GCAAGATGTACGGAGGCGCTCGCCAACGCTCCACGCAACACCCCGTGCGCGTGCGCGGGCACTTCCG
CGCTCCCTGGGGCGCCCTCAAGGGCCGCGTGCGGTCGCGCACCACCGTCGACGACGTGATCGACCAG
GTGGTGGCCGACGCGCGCAACTACACCCCCGCCGCCGCGCCCGTCTCCACCGTGGACGCCGTCATCGA
CAGCGTGGTGGCcGACGCGCGCCGGTACGCCCGCGCCAAGAGCCGGCGGCGGCGCATCGCCCGGCGG
CACCGGAGCACCCCCGCCATGCGCGCGGCGCGAGCCTTGCTGCGCAGGGCCAGGCGCACGGGACGCA
GGGCCATGCTCAGGGCGGCCAGACGCGCGGCTTCAGGCGCCAGCGCCGGCAGGACCCGGAGACGCG
CGGCCACGGCGGCGGCAGCGGCCATCGCCAGCATGTCCCGCCCGCGGCGAGGGAACGTGTACTGGGT
GCGCGACGCCGCCACCGGTGTGCGCGTGCCCGTGCGCACCCGCCCCCCTCGCACTTGAAGATGTTCAC
TTCGCGATGTTGATGTGTCCCAGCGGCGAGGAGGATGTCCAAGCGCAAATTCAAGGAAGAGATGCTC
CAGGTCATCGCGCCTGAGATCTACGGCCCTGCGGTGGTGAAGGAGGAAAGAAAGCCCCGCAAAATCA
AGCGGGTCAAAAAGGACAAAAAGGAAGAAGAAAGTGATGTGGACGGATTGGTGGAGTTTGTGCGCG
AGTTCGCCCCCCGGCGGCGCGTGCAGTGGCGCGGGCGGAAGGTGCAACCGGTGCTGAGACCCGGCAC
CACCGTGGTCTTCACGCCCGGCGAGCGCTCCGGCACCGCTTCCAAGCGCTCCTACGACGAGGTGTACG
GGGATGATGATATTCTGGAGCAGGCGGCCGAGCGCCTGGGCGAGTTTGCTTACGGCAAGCGCAGCCG
TTCCGCACCGAAGGAAGAGGCGGTGTCCATCCCGCTGGACCACGGCAACCCCACGCCGAGCCTCAAG
CCCGTGACCTTGCAGCAGGTGCTGCCGACCGCGGCGCCGCGCCGGGGGTTCAAGCGCGAGGGCGAGG
ATCTGTACCCCACCATGCAGCTGATGGTGCCCAAGCGCCAGAAGCTGGAAGACGTGCTGGAGACCAT
GAAGGTGGACCCGGACGTGCAGCCCGAGGTCAAGGTGCGGCCCATCAAGCAGGTGGCCCCGGGCCTG
GGCGTGCAGACCGTGGACATCAAGATTCCCACGGAGCCCATGGAAACGCAGACCGAGCCCATGATCA
AGCCCAGCACCAGCACCATGGAGGTGCAGACGGATCCCTGGATGCCATCGGCTCCTAGTCGAAGACC
CCGGCGCAAGTACGGCGCGGCCAGCCTGCTGATGCCCAACTACGCGCTGCATCCTTCCATCATCCCCA
CGCCGGGCTACCGCGGCACGCGCTTCTACCGCGGTCATACCAGCAGCCGCCGCCGCAAGACCACCAC
TCGCCGCCGCCGTCGCCGCACCGCCGCTGCAACCACCCCTGCCGCCCTGGTGCGGAGAGTGTACCGCC
GCGGCCGCGCACCTCTGACCCTGCCGCGCGCGCGCTACCACCCGAGCATCGCCATTTAAACTTTCGCCt
GCTTTGCAGATCAATGGCCCTCACATGCCGCCTTCGCGTTCCCATTACGGGCTACCGAGGAAGAAAAC
CGCGCCGTAGAAGGCTGGCGGGGAACGGGATGCGTCGCCACCACCACCGGCGGCGGCGCGCCATCAG
CAAGCGGTTGGGGGGAGGCTTCCTGCCCGCGCTGATCCCCATCATCGCCGCGGCGATCGGGGCGATC
CCCGGCATTGCTTCCGTGGCGGTGCAGGCCTCTCAGCGCCACTGAGACACACTTGGAAACATCTTGTA
ATAAACCaATGGACTCTGACGCTCCTGGTCCTGTGATGTGTTTTCGTAGACAGATGGAAGACATCAAT
TTTTCGTCCCTGGCTCCGCGACACGGCACGCGGCCGTTCATGGGCACCTGGAGCGACATCGGCACCAG
CCAACTGAACGGGGGCGCCTTCAATTGGAGCAGTCTCTGGAGCGGGCTTAAGAATTTCGGGTCCACG
CTTAAAACCTATGGCAGCAAGGCGTGGAACAGCACCACAGGGCAGGCGCTGAGGGATAAGCTGAAA
GAGCAGAACTTCCAGCAGAAGGTGGTCGATGGGCTCGCCTCGGGCATCAACGGGGTGGTGGACCTGG
CCAACCAGGCCGTGCAGCGGCAGATCAACAGCCGCCTGGACCCGGTGCCGCCCGCCGGCTCCGTGGA
GATGCCGCAGGTGGAGGAGGAGCTGCCTCCCCTGGACAAGCGGGGCGAGAAGCGACCCCGCCCCGAT
GCGGAGGAGACGCTGCTGACGCACACGGACGAGCCGCCCCCGTACGAGGAGGCGGTGAAACTGGGT
CTGCCCACCACGCGGCCCATCGCGCCCCTGGCCACCGGGGTGCTGAAACCCGAAAAGCCCGCGACCC
TGGACTTGCCTCCTCCCCAGCCTTCCCGCCCCTCTACAGTGGCTAAGCCCCTGCCGCCGGTGGCCGTG
GCCCGCGCGCGACCCGGGGGCACCGCCCGCCCTCATGCGAACTGGCAGAGCACTCTGAACAGCATCG
TGGGTCTGGGAGTGCAGAGTGTGAAGCGCCGCCGCTGCTATTAAACCTACCGTAGCGCTTAACTTGCT
TGTCTGTGTGTGTATGTATTATGTCGCCGCCGCCGCTGTCCACCAGAAGGAGGAGTGAAGAGGCGCGT
CGCCGAGTTGCAAGATGGCCACCCCATCGATGCTGCCCCAGTGGGCGTACATGCACATCGCCGGACA
GGACGCTTCGGAGTACCTGAGTCCGGGTCTGGTGCAGTTTGCCCGCGCCACAGACACCTACTTCAGTC
TGGGGAACAAGTTTAGGAACCCCACGGTGGCGCCCACGCACGATGTGACCACCGACCGCAGCCAGCG
GCTGACGCTGCGCTTCGTGCCCGTGGACCGCGAGGACAACACCTACTCGTACAAAGTGCGCTACACG
CTGGCCGTGGGCGACAACCGCGTGCTGGACATGGCCAGCACCTACTTTGACATCCGCGGCGTGCTGG
ATCGGGGCCCTAGCTTCAAACCCTACTCCGGCACCGCCTACAACAGTCTGGCCCCCAAGGGAGCACCC
AACACTTGTCAGTGGACATATAAAGCCGATGGTGAAACTGCCACAGAAAAAACCTATACATATGGAA
ATGCACCCGTGCAGGGCATTAACATCACAAAAGATGGTATTCAACTTGGAACTGACACCGATGATCA
GCCAATCTACGCAGATAAAACCTATCAGCCTGAACCTCAAGTGGGTGATGCTGAATGGCATGACATC
ACTGGTACTGATGAAAAGTATGGAGGCAGAGCTCTTAAGCCTGATACCAAAATGAAGCCTTGTTATG
GTTCTTTTGCCAAGCCTACTAATAAAGAAGGAGGTCAGGCAAATGTGAAAACAGGAACAGGCACTAC
TAAAGAATATGACATAGACATGGCTTTCTTTGACAACAGAAGTGCGGCTGCTGCTGGCCTAGCTCCAG
AAATTGTTTTGTATACTGAAAATGTGGATTTGGAAACTCCAGATACCCATATTGTATACAAAGCAGGC
ACAGATGACAGCAGCTCTTCTATTAATTTGGGTCAGCAAGCCATGCCCAACAGACCTAACTACATTGG
TTTCAGAGACAACTTTATCGGGCTCATGTACTACAACAGCACTGGCAATATGGGGGTGCTGGCCGGTC
AGGCTTCTCAGCTGAATGCTGTGGTTGACTTGCAAGACAGAAACACCGAGCTGTCCTACCAGCTCTTG
CTTGACTCTCTGGGTGACAGAACCCGGTATTTCAGTATGTGGAATCAGGCGGTGGACAGCTATGATCC
TGATGTGCGCATTATTGAAAATCATGGTGTGGAGGATGAACTTCCCAACTATTGTTTCCCTCTGGATG
CTGTTGGCAGAACAGATACTTATCAGGGAATTAAGGCTAATGGAACTGATCAAACCACATGGACCAA
AGATGACAGTGTCAATGATGCTAATGAGATAGGCAAGGGTAATCCATTCGCCATGGAAATCAACATC
CAAGCCAACCTGTGGAGGAACTTCCTCTACGCCAACGTGGCCCTGTACCTGCCCGACTCTTACAAGTA
CACGCCGGCCAATGTTACCCTGCCCACCAACACCAACACCTACGATTACATGAACGGCCGGGTGGTG
GCGCCCTCGCTGGTGGACTCCTACATCAACATCGGGGCGCGCTGGTCGCTGGATCCCATGGACAACGT
GAACCCCTTCAACCACCACCGCAATGCGGGGCTGCGCTACCGCTCCATGCTCCTGGGCAACGGGCGCT
ACGTGCCCTTCCACATCCAGGTGCCCCAGAAATTTTTCGCCATCAAGAGCCTCCTGCTCCTGCCCGGG
TCCTACACCTACGAGTGGAACTTCCGCAAGGACGTCAACATGATCCTGCAGAGCTCCCTCGGCAACGA
CCTGCGCACGGACGGGGCCTCCATCTCCTTCACCAGCATCAACCTCTACGCCACCTTCTTCCCCATGGC
GCACAACACGGCCTCCACGCTCGAGGCCATGCTGCGCAACGACACCAACGACCAGTCCTTCAACGAC
TACCTCTCGGCGGCCAACATGCTCTACCCCATCCCGGCCAACGCCACCAACGTGCCCATCTCCATCCC
CTCGCGCAACTGGGCCGCCTTCCGCGGCTGGTCCTTCACGCGTCTCAAGACCAAGGAGACGCCCTCGC
TGGGCTCCGGGTTCGACCCCTACTTCGTCTACTCGGGCTCCATCCCCTACCTCGACGGCACCTTCTACC
TCAACCACACCTTCAAGAAGGTCTCCATCACCTTCGACTCCTCCGTCAGCTGGCCCGGCAACGACCGG
CTCCTGACGCCCAACGAGTTCGAAATCAAGCGCACCGTCGACGGCGAGGGCTACAACGTGGCCCAGT
GCAACATGACCAAGGACTGGTTCCTGGTCCAGATGCTGGCCCACTACAACATCGGCTACCAGGGCTTC
TACGTGCCCGAGGGCTACAAGGACCGCATGTACTCCTTCTTCCGCAACTTCCAGCCCATGAGCCGCCA
GGTGGTGGACGAGGTCAACTACAAGGACTACCAGGCCGTCACCCTGGCCTACCAGCACAACAACTCG
GGCTTCGTCGGCTACCTCGCGCCCACCATGCGCCAGGGCCAGCCCTACCCCGCCAACTACCCCTACCC
GCTCATCGGCAAGAGCGCCGTCACCAGCGTCACCCAGAAAAAGTTCCTCTGCGACAGGGTCATGTGG
CGCATCCCCTTCTCCAGCAACTTCATGTCCATGGGCGCGCTCACCGACCTCGGCCAGAACATGCTCTA
TGCCAACTCCGCCCACGCGCTAGACATGAATTTCGAAGTCGACCCCATGGATGAGTCCACCCTTCTCT
ATGTTGTCTTCGAAGTCTTCGACGTCGTCCGAGTGCACCAGCCCCACCGCGGCGTCATCGAGGCCGTC
TACCTGCGCACCCCCTTCTCGGCCGGTAACGCCACCACCTAAGCTCTTGCTTCTTGCAAGCCATGGCC
GCGGGCTCCGGCGAGCAGGAGCTCAGGGCCATCATCCGCGACCTGGGCTGCGGGCCCTACTTCCTGG
GCACCTTCGATAAGCGCTTCCCGGGATTCATGGCCCCGCACAAGCTGGCCTGCGCCATCGTCAACACG
GCCGGCCGCGAGACCGGGGGCGAGCACTGGCTGGCCTTCGCCTGGAACCCGCGCTCGAACACCTGCT
ACCTCTTCGACCCCTTCGGGTTCTCGGACGAGCGCCTCAAGCAGATCTACCAGTTCGAGTACGAGGGC
CTGCTGCGCCGCAGCGCCCTGGCCACCGAGGACCGCTGCGTCACCCTGGAAAAGTCCACCCAGACCG
TGCAGGGTCCGCGCTCGGCCGCCTGCGGGCTCTTCTGCTGCATGTTCCTGCACGCCTTCGTGCACTGGC
CCGACCGCCCCATGGACAAGAACCCCACCATGAACTTGCTGACGGGGGTGCCCAACGGCATGCTCCA
GTCGCCCCAGGTGGAACCCACCCTGCGCCGCAACCAGGAGGCGCTCTACCGCTTCCTCAACTCCCACT
CCGCCTACTTTCGCTCCCACCGCGCGCGCATCGAGAAGGCCACCGCCTTCGACCGCATGAATCAAGAC
ATGTAAACCGTGTGTGTATGTTAAATGTCTTTAATAAACAGCACTTTCATGTTACACATGCATCTGAG
ATGATTTATTTAGAAATCGAAAGGGTTCTGCCGGGTCTCGGCATGGCCCGCGGGCAGGGACACGTTGC
GGAACTGGTACTTGGCCAGCCACTTGAACTCGGGGATCAGCAGTTTGGGCAGCGGGGTGTCGGGGAA
GGAGTCGGTCCACAGCTTCCGCGTCAGTTGCAGGGCGCCCAGCAGGTCGGGCGCGGAGATCTTGAAA
TCGCAGTTGGGACCCGCGTTCTGCGCGCGGGAGTTGCGGTACACGGGGTTGCAGCACTGGAACACCA
TCAGGGCCGGGTGCTTCACGCTCGCCAGCACCGTCGCGTCGGTGATGCTCTCCACGTCGAGGTCCTCG
GCGTTGGCCATCCCGAAGGGGGTCATCTTGCAGGTCTGCCTTCCCATGGTGGGCACGCACCCGGGCTT
GTGGTTGCAATCGCAGTGCAGGGGGATCAGCATCATCTGGGCCTGGTCGGCGTTCATCCCCGGGTACA
TGGCCTTCATGAAAGCCTCCAATTGCCTGAACGCCTGCTGGGCCTTGGCTCCCTCGGTGAAGAAGACC
CCGCAGGACTTGCTAGAGAACTGGTTGGTGGCGCACCCGGCGTCGTGCACGCAGCAGCGCGCGTCGT
TGTTGGCCAGCTGCACCACGCTGCGCCCCCAGCGGTTCTGGGTGATCTTGGCCCGGTCGGGGTTCTCC
TTCAGCGCGCGCTGCCCGTTCTCGCTCGCCACATCCATCTCGATCATGTGCTCCTTCTGGATCATGGTG
GTCCCGTGCAGGCACCGCAGCTTGCCCTCGGCCTCGGTGCACCCGTGCAGCCACAGCGCGCACCCGGT
GCACTCCCAGTTCTTGTGGGCGATCTGGGAATGCGCGTGCACGAAGCCCTGCAGGAAGCGGCCCATC
ATGGTGGTCAGGGTCTTGTTGCTAGTGAAGGTCAGCGGAATGCCGCGGTGCTCCTCGTTGATGTACAG
GTGGCAGATGCGGCGGTACACCTCGCCCTGCTCGGGCATCAGCTGGAAGTTGGCTTTCAGGTCGGTCT
CCACGCGGTAGCGGTCCATCAGCATAGTCATGATTTCCATACCCTTCTCCCAGGCCGAGACGATGGGC
AGGCTCATAGGGTTCTTCACCATCATCTTAGCGCTAGCAGCCGCGGCCAGGGGGTCGCTCTCGTCCAG
GGTCTCAAAGCTCCGCTTGCCGTCCTTCTCGGTGATCCGCACCGGGGGGTAGCTGAAGCCCACGGCCG
CCAGCTCCTCCTCGGCCTGTCTTTCGTCCTCGCTGTCCTGGCTGACGTCCTGCAGGACCACATGCTTGG
TCTTGCGGGGTTTCTTCTTGGGCGGCAGCGGCGGCGGAGATGTTGGAGATGGCGAGGGGGAGCGCGA
GTTCTCGCTCACCACTACTATCTCTTCCTCTTCTTGGTCCGAGGCCACGCGGCGGTAGGTATGTCTCTT
CGGGGGCAGAGGCGGAGGCGACGGGCTCTCGCCGCCGCGACTTGGCGGATGGCTGGCAGAGCCCCTT
CCGCGTTCGGGGGTGCGCTCCCGGCGGCGCTCTGACTGACTTCCTCCGCGGCCGGCCATTGTGTTCTC
CTAGGGAGGAACAACAAGCATGGAGACTCAGCCATCGCCAACCTCGCCATCTGCCCCCACCGCCGAC
GAGAAGCAGCAGCAGCAGAATGAAAGCTTAACCGCCCCGCCGCCCAGCCCCGCCACCTCCGACGCGG
CCGTCCCAGACATGCAAGAGATGGAGGAATCCATCGAGATTGACCTGGGCTATGTGACGCCCGCGGA
GCACGAGGAGGAGCTGGCAGTGCGCTTTTCACAAGAAGAGATACACCAAGAACAGCCAGAGCAGGA
AGCAGAGAATGAGCAGAGTCAGGCTGGGCTCGAGCATGACGGCGACTACCTCCACCTGAGCGGGGG
GGAGGACGCGCTCATCAAGCATCTGGCCCGGCAGGCCACCATCGTCAAGGATGCGCTGCTCGACCGC
ACCGAGGTGCCCCTCAGCGTGGAGGAGCTCAGCCGCGCCTACGAGTTGAACCTCTTCTCGCCGCGCGT
GCCCCCCAAGCGCCAGCCCAATGGCACCTGCGAGCCCAACCCGCGCCTCAACTTCTACCCGGTCTTCG
CGGTGCCCGAGGCCCTGGCCACCTACCACATCTTTTTCAAGAACCAAAAGATCCCCGTCTCCTGCCGC
GCCAACCGCACCCGCGCCGACGCCCTTTTCAACCTGGGTCCCGGCGCCCGCCTACCTGATATCGCCTC
CTTGGAAGAGGTTCCCAAGATCTTCGAGGGTCTGGGCAGCGACGAGACTCGGGCCGCGAACGCTCTG
CAAGGAGAAGGAGGAGAGCATGAGCACCACAGCGCCCTGGTCGAGTTGGAAGGCGACAACGCGCGG
CTGGCGGTGCTCAAACGCACGGTCGAGCTGACCCATTTCGCCTACCCGGCTCTGAACCTGCCCCCCAA
AGTCATGAGCGCGGTCATGGACCAGGTGCTCATCAAGCGCGCGTCGCCCATCTCCGAGGACGAGGGC
ATGCAAGACTCCGAGGAGGGCAAGCCCGTGGTCAGCGACGAGCAGCTGGCCCGGTGGCTGGGTCCTA
ATGCTAGTCCCCAGAGTTTGGAAGAGCGGCGCAAACTCATGATGGCCGTGGTCCTGGTGACCGTGGA
GCTGGAGTGCCTGCGCCGCTTCTTCGCCGACGCGGAGACCCTGCGCAAGGTCGAGGAGAACCTGCAC
TACCTCTTCAGGCACGGGTTCGTGCGCCAGGCCTGCAAGATCTCCAACGTGGAGCTGACCAACCTGGT
CTCCTACATGGGCATCTTGCACGAGAACCGCCTGGGGCAGAACGTGCTGCACACCACCCTGCGCGGG
GAGGCCCGGCGCGACTACATCCGCGACTGCGTCTACCTCTACCTCTGCCACACCTGGCAGACGGGCAT
GGGCGTGTGGCAGCAGTGTCTGGAGGAGCAGAACCTGAAAGAGCTCTGCAAGCTCCTGCAGAAGAAC
CTCAAGGGTCTGTGGACCGGGTTCGACGAGCGCACCACCGCCTCGGACCTGGCCGACCTCATTTTCCC
CGAGCGCCTCAGGCTGACGCTGCGCAACGGCCTGCCCGACTTTATGAGCCAAAGCATGTTGCAAAAC
TTTCGCTCTTTCATCCTCGAACGCTCCGGAATCCTGCCCGCCACCTGCTCCGCGCTGCCCTCGGACTTC
GTGCCGCTGACCTTCCGCGAGTGCCCCCCGCCGCTGTGGAGCCACTGCTACCTGCTGCGCCTGGCCAA
CTACCTGGCCTACCACTCGGACGTGATCGAGGACGTCAGCGGCGAGGGCCTGCTCGAGTGCCACTGC
CGCTGCAACCTCTGCACGCCGCACCGCTCCCTGGCCTGCAACCCCCAGCTGCTGAGCGAGACCCAGAT
CATCGGCACCTTCGAGTTGCAAGGGCCCAGCGAAGGCGAGGGTTCAGCCGCCAAGGGGGGTCTGAAA
CTCACCCCGGGGCTGTGGACCTCGGCCTACTTGCGCAAGTTCGTGCCCGAGGACTACCATCCCTTCGA
GATCAGGTTCTACGAGGACCAATCCCATCCGCCCAAGGCCGAGCTGTCGGCCTGCGTCATCACCCAGG
GGGCGATCCTGGCCCAATTGCAAGCCATCCAGAAATCCCGCCAAGAATTCTTGCTGAAAAAGGGCCG
CGGGGTCTACCTCGACCCCCAGACCGGTGAGGAGCTCAACCCCGGCTTCCCCCAGGATGCCCCGAGG
AAACAAGAAGCTGAAAGTGGAGCTGCCGCCCGTGGAGGATTTGGAGGAAGACTGGGAGAACAGCAG
TCAGGCAGAGGAGGAGGAGATGGAGGAAGACTGGGACAGCACTCAGGCAGAGGAGGACAGCCTGCA
AGACAGTCTGGAGGAAGACGAGGAGGAGGCAGAGGAGGAGGTGGAAGAAGCAGCCGCCGCCAGAC
CGTCGTCCTCGGCGGGGGAGAAAGCAAGCAGCACGGATACCATCTCCGCTCCGGGTCGGGGTCCCGC
TCGACCACACAGTAGATGGGACGAGACCGGACGATTCCCGAACCCCACCACCCAGACCGGTAAGAAG
GAGCGGCAGGGATACAAGTCCTGGCGGGGGCACAAAAACGCCATCGTCTCCTGCTTGCAGGCCTGCG
GGGGCAACATCTCCTTCACCCGGCGCTACCTGCTCTTCCACCGCGGGGTGAACTTTCCCCGCAACATC
TTGCATTACTACCGTCACCTCCACAGCCCCTACTACTTCCAAGAAGAGGCAGCAGCAGCAGAAAAAG
ACCAGCAGAAAACCAGCAGCTAGAAAATCCACAGCGGCGGCAGCAGGTGGACTGAGGATCGCGGCG
AACGAGCCGGCGCAAACCCGGGAGCTGAGGAACCGGATCTTTCCCACCCTCTATGCCATCTTCCAGCA
GAGTCGGGGGCAGGAGCAGGAACTGAAAGTCAAGAACCGTTCTCTGCGCTCGCTCACCCGCAGTTGT
CTGTATCACAAGAGCGAAGACCAACTTCAGCGCACTCTCGAGGACGCCGAGGCTCTCTTCAACAAGT
ACTGCGCGCTCACTCTTAAAGAGTAGCCCGCGCCCGCCCAGTCGCAGAAAAAGGCGGGAATTACGTC
ACCTGTGCCCTTCGCCCTAGCCGCCTCCACCCATCATCATGAGCAAAGAGATTCCCACGCCTTACATG
TGGAGCTACCAGCCCCAGATGGGCCTGGCCGCCGGTGCCGCCCAGGACTACTCCACCCGCATGAATT
GGCTCAGCGCCGGGCCCGCGATGATCTCACGGGTGAATGACATCCGCGCCCACCGAAACCAGATACT
CCTAGAACAGTCAGCGCTCACCGCCACGCCCCGCAATCACCTCAATCCGCGTAATTGGCCCGCCGCCC
TGGTGTACCAGGAAATTCCCCAGCCCACGACCGTACTACTTCCGCGAGACGCCCAGGCCGAAGTCCA
GCTGACTAACTCAGGTGTCCAGCTGGCGGGCGGCGCCACCCTGTGTCGTCACCGCCCCGCTCAGGGTA
TAAAGCGGCTGGTGATCCGGGGCAGAGGCACACAGCTCAACGACGAGGTGGTGAGCTCTTCGCTGGG
TCTGCGACCTGACGGAGTCTTCCAACTCGCCGGATCGGGGAGATCTTCCTTCACGCCTCGTCAGGCCG
TCCTGACTTTGGAGAGTTCGTCCTCGCAGCCCCGCTCGGGTGGCATCGGCACTCTCCAGTTCGTGGAG
GAGTTCACTCCCTCGGTCTACTTCAACCCCTTCTCCGGCTCCCCCGGCCACTACCCGGACGAGTTCATC
CCGAACTTCGACGCCATCAGCGAGTCGGTGGACGGCTACGATTGAAACTAATCACCCCCTTATCCAGT
GAAATAAAGATCATATTGATGATGATTTTACAGAAATAAAAAATAATCATTTGATTTGAAATAAAGAT
ACAATCATATTGATGATTTGAGTTTAACAAAAAAATAAAGAATCACTTACTTGAAATCTGATACCAGG
TCTCTGTCCATGTTTTCTGCCAACACCACTTCACTCCCCTCTTCCCAGCTCTGGTACTGCAGGCCCCGG
CGGGCTGCAAACTTCCTCCACACGCTGAAGGGGATGTCAAATTCCTCCTGTCCCTCAATCTTCATTTTA
TCTTCTATCAGATGTCCAAAAAGCGCGTCCGGGTGGATGATGACTTCGACCCCGTCTACCCCTACGAT
GCAGACAACGCACCGACCGTGCCCTTCATCAACCCCCCCTTCGTCTCTTCAGATGGATTCCAAGAGAA
GCCCCTGGGGGTGTTGTCCCTGCGACTGGCCGACCCCGTCACCACCAAGAACGGGGAAATCACCCTC
AAGCTGGGAGAGGGGGTGGACCTCGATTCCTCGGGAAAACTCATCTCCAACACGGCCACCAAGGCCG
CCGCCCCTCTCAGTTTTTCCAACAACACCATTTCCCTTAACATGGATCACCCCTTTTACACTAAAGATG
GAAAATTATCCTTACAAGTTTCTCCACCATTAAATATACTGAGAACAAGCATTCTAAACACACTAGCT
TTAGGTTTTGGATCAGGTTTAGGACTCCGTGGCTCTGCCTTGGCAGTACAGTTAGTCTCTCCACTTACA
TTTGATACTGATGGAAACATAAAGCTTACCTTAGACAGAGGTTTGCATGTTACAACAGGAGATGCAAT
TGAAAGCAACATAAGCTGGGCTAAAGGTTTAAAATTTGAAGATGGAGCCATAGCAACCAACATTGGA
AATGGGTTAGAGTTTGGAAGCAGTAGTACAGAAACAGGTGTTGATGATGCTTACCCAATCCAAGTTA
AACTTGGATCTGGCCTTAGCTTTGACAGTACAGGAGCCATAATGGCTGGTAACAAAGAAGACGATAA
ACTCACTTTGTGGACAACACCTGATCCATCACCAAACTGTCAAATACTCGCAGAAAATGATGCAAAAC
TAACACTTTGCTTGACTAAATGTGGTAGTCAAATACTGGCCACTGTGTCAGTCTTAGTTGTAGGAAGT
GGAAACCTAAACCCCATTACTGGCACCGTAAGCAGTGCTCAGGTGTTTCTACGTTTTGATGCAAACGG
TGTTCTTTTAACAGAACATTCTACACTAAAAAAATACTGGGGGTATAGGCAGGGAGATAGCATAGAT
GGCACTCCATATACCAATGCTGTAGGATTCATGCCCAATTTAAAAGCTTATCCAAAGTCACAAAGTTC
TACTACTAAAAATAATATAGTAGGGCAAGTATACATGAATGGAGATGTTTCAAAACCTATGCTTCTCA
CTATAACCCTCAATGGTACTGATGACAGCAACAGTACATATTCAATGTCATTTTCATACACCTGGACT
AATGGAAGCTATGTTGGAGCAACATTTGGGGCTAACTCTTATACCTTCTCATACATCGCCCAAGAATG
AACACTGTATCCCACCCTGCATGCCAACCCTTCCCACCCCACTCTGTGGAACAAACTCTGAAACACAA
AATAAAATAAAGTTCAAGTGTTTTATTGATTCAACAGTTTTACAGGATTCGAGCAGTTATTTTTCCTCC
ACCCTCCCAGGACATGGAATACACCACCCTCTCCCCCCGCACAGCCTTGAACATCTGAATGCCATTGG
TGATGGACATGCTTTTGGTCTCCACGTTCCACACAGTTTCAGAGCGAGCCAGTCTCGGGTCGGTCAGG
GAGATGAAACCCTCCGGGCACTCCCGCATCTGCACCTCACAGCTCAACAGCTGAGGATTGTCCTCGGT
GGTCGGGATCACGGTTATCTGGAAGAAGCAGAAGAGCGGCGGTGGGAATCATAGTCCGCGAACGGG
ATCGGCCGGTGGTGTCGCATCAGGCCCCGCAGCAGTCGCTGCCGCCGCCGCTCCGTCAAGCTGCTGCT
CAGGGGGTCCGGGTCCAGGGACTCCCTCAGCATGATGCCCACGGCCCTCAGCATCAGTCGTCTGGTGC
GGCGGGCGCAGCAGCGCATGCGGATCTCGCTCAGGTCGCTGCAGTACGTGCAACACAGAACCACCAG
GTTGTTCAACAGTCCATAGTTCAACACGCTCCAGCCGAAACTCATCGCGGGAAGGATGCTACCCACGT
GGCCGTCGTACCAGATCCTCAGGTAAATCAAGTGGTGCCCCCTCCAGAACACGCTGCCCACGTACATG
ATCTCCTTGGGCATGTGGCGGTTCACCACCTCCCGGTACCACATCACCCTCTGGTTGAACATGCAGCC
CCGGATGATCCTGCGGAACCACAGGGCCAGCACCGCCCCGCCCGCCATGCAGCGAAGAGACCCCGGG
TCCCGGCAATGGCAATGGAGGACCCACCGCTCGTACCCGTGGATCATCTGGGAGCTGAACAAGTCTA
TGTTGGCACAGCACAGGCATATGCTCATGCATCTCTTCAGCACTCTCAACTCCTCGGGGGTCAAAACC
ATATCCCAGGGCACGGGGAACTCTTGCAGGACAGCGAACCCCGCAGAACAGGGCAATCCTCGCACAG
AACTTACATTGTGCATGGACAGGGTATCGCAATCAGGCAGCACCGGGTGATCCTCCACCAGAGAAGC
GCGGGTCTCGGTCTCCTCACAGCGTGGTAAGGGGGCCGGCCGATACGGGTGATGGCGGGACGCGGCT
GATCGTGTTCGCGACCGTGTCATGATGCAGTTGCTTTCGGACATTTTCGTACTTGCTGTAGCAGAACCT
GGTCCGGGCGCTGCACACCGATCGCCGGCGGCGGTCTCGGCGCTTGGAACGCTCGGTGTTGAAATTGT
AAAACAGCCACTCTCTCAGACCGTGCAGCAGATCTAGGGCCTCAGGAGTGATGAAGATCCCATCATG
CCTGATGGCTCTGATCACATCGACCACCGTGGAATGGGCCAGACCCAGCCAGATGATGCAATTTTGTT
GGGTTTCGGTGACGGCGGGGGAGGGAAGAACAGGAAGAACCATGATTAACTTTTAATCCAAACGGTC
TCGGAGTACTTCAAAATGAAGATCGCGGAGATGGCACCTCTCGCCCCCGCTGTGTTGGTGGAAAATA
ACAGCCAGGTCAAAGGTGATACGGTTCTCGAGATGTTCCACGGTGGCTTCCAGCAAAGCCTCCACGC
GCACATCCAGAAACAAGACAATAGCGAAAGCGGGAGGGTTCTCTAATTCCTCAATCATCATGTTACA
CTCCTGCACCATCCCCAGATAATTTTCATTTTTCCAGCCTTGAATGATTCGAACTAGTTCcTGAGGTAA
ATCCAAGCCAGCCATGATAAAGAGCTCGCGCAGAGCGCCCTCCACCGGCATTCTTAAGCACACCCTC
ATAATTCCAAGATATTCTGCTCCTGGTTCACCTGCAGCAGATTGACAAGCGGAATATCAAAATCTCTG
CCGCGATCCCTGAGCTCCTCCCTCAGCAATAACTGTAAGTACTCTTTCATATCCTCTCCGAAATTTTTA
GCCATAGGACCACCAGGAATAAGATTAGGGCAAGCCACAGTACAGATAAACCGAAGTCCTCCCCAGT
GAGCATTGCCAAATGCAAGACTGCTATAAGCATGCTGGCTAGACCCGGTGATATCTTCCAGATAACTG
GACAGAAAATCGCCCAGGCAATTTTTAAGAAAATCAACAAAAGAAAAATCCTCCAGGTGGACGTTTA
GAGCCTCGGGAACAACGATGAAGTAAATGCAAGCGGTGCGTTCCAGCATGGTTAGTTAGCTGATCTG
TAGAAAAAACAAAAATGAACATTAAACCATGCTAGCCTGGCGAACAGGTGGGTAAATCGTTCTCTCC
AGCACCAGGCAGGCCACGGGGTCTCCGGCGCGACCCTCGTAAAAATTGTCGCTATGATTGAAAACCA
TCACAGAGAGACGTTCCCGGTGGCCGGCGTGAATGATTCGACAAGATGAATACACCCCCGGAACATT
GGCGTCCGCGAGTGAAAAAAAGCGCCCGAGGAAGCAATAAGGCACTACAATGCTCAGTCTCAAGTCC
AGCAAAGCGATGCCATGCGGATGAAGCACAAAATTCTCAGGTGCGTACAAAATGTAATTACTCCCCT
CCTGCACAGGCAGCAAAGCCCCCGATCCCTCCAGGTACACATACAAAGCCTCAGCGTCCATAGCTTAC
CGAGCAGCAGCACACAACAGGCGCAAGAGTCAGAGAAAGGCTGAGCTCTAACCTGTCCACCCGCTCT
CTGCTCAATATATAGCCCAGATCTACACTGACGTAAAGGCCAAAGTCTAAAAATACCCGCCAAATAA
TCACACACGCCCAGCACACGCCCAGAAACCGGTGACACACTCAAAAAAATACGCGCACTTCCTCAAA
CGCCCAAAACTGCCGTCATTTCCGGGTTCCCACGCTACGTCATCAAAACACGACTTTCAAATTCCGTC
GACCGTTAAAAACGTCACCCGCCCCGCCCCTAACGGTCGCCCGTCTCTCAGCCAATCAGCGCCCCGCA
TCCCCAAATTCAAACACCTCATTTGCATATTAACGCGCACAAAAAGTTTGAGGTATATTATTGATGAT
GgTTAATTAA
Ipilimumab nucleotide sequence (SEQ ID NO: 73)

[chemical structure]

[chemical structure]

Tremelimumab nucleotide sequence (SEQ ID NO: 82)
ATGGGCTGGTCCTGCATCATCCTGTTTCTGGTGGCTACAGCCACAGGCGTGCACTCTCAGGTGC
AACTGGTTGAATCTGGTGGCGGAGTGGTGCAGCCTGGCAGATCTCTGAGACTGTCTTGTGCTGC
CAGCGGCTTCACCTTCAGCAGCTATGGCATGCACTGGGTTCGACAGGCCCCTGGCAAAGGACT
GGAATGGGTTGCCGTGATTTGGTACGACGGCAGCAACAAGTACTACGCCGACAGCGTGAAGGG
CAGATTCACCATCTCCAGAGACAACAGCAAGAACACCCTGTACCTGCAGATGAACAGCCTGAGA
GCCGAGGACACCGCCGTGTACTATTGCGCTAGAGATCCTAGAGGCGCCACACTGTACTACTACT
ATTACGGCATGGACGTGTGGGGCCAGGGCACCACAGTTACAGTGTCTAGCGCCTCTACAAAGG
GCCCCTCCGTTTTTCCTCTGGCTCCTTGTTCTAGAAGCACCAGCGAGTCTACAGCCGCTCTGGG
CTGTCTGGTCAAGGACTACTTTCCTGAGCCTGTGACCGTGTCCTGGAATTCTGGTGCTCTGACA
AGCGGCGTGCACACCTTTCCAGCCGTGCTGCAAAGCAGCGGCCTGTACTCTCTGTCTAGCGTGG
TCACCGTGCCTAGCAGCAATTTCGGCACCCAGACCTACACCTGTAACGTGGACCACAAGCCTAG
CAACACCAAGGTGGACAAGACCGTGGAACGGAAGTGCTGCGTGGAATGCCCTCCTTGTCCTGC
TCCTCCAGTGGCCGGACCTTCCGTGTTTCTGTTCCCTCCAAAGCCTAAGGACACCCTGATGATC
AGCAGAACCCCTGAAGTGACCTGCGTGGTGGTGGATGTGTCTCACGAGGATCCCGAGGTGCAG
TTCAATTGGTACGTGGACGGCGTGGAAGTGCACAACGCCAAGACCAAGCCTAGAGAGGAACAG
TTCAACTCCACCTTCAGAGTGGTGTCCGTGCTGACCGTGGTGCATCAGGACTGGCTGAACGGCA
AAGAGTACAAGTGCAAGGTGTCCAACAAGGGCCTGCCTGCTCCTATCGAGAAAACCATCAGCAA
GACCAAAGGCCAGCCTCGCGAGCCTCAGGTTTACACACTGCCTCCAAGCCGGGAAGAGATGAC
CAAGAATCAGGTGTCCCTGACCTGCCTGGTTAAGGGCTTCTACCCCAGCGACATCTCCGTGGAA
TGGGAGTCTAATGGCCAGCCAGAGAACAACTACAAGACCACACCTCCTATGCTGGACTCCGATG
GCTCATTCTTCCTGTACAGCAAGCTGACAGTGGACAAGTCCAGATGGCAGCAGGGCAACGTGTT
CAGCTGTTCTGTGATGCACGAGGCCCTGCACAACCACTACACCCAGAAGTCTCTGTCTCTGAGC
CCCGGCAAACGGAAGAGAAGAGGCGTTAGAGCCGAAGGCAGAGGCTCTCTGCTGACATGCGGA
GATGTGGAAGAGAACCCCGGACCTATGGACATGAGAGTGCCTGCTCAACTGCTGGGACTGCTG
CTTCTTTGGCTGCCTGGCGCTAGATGCGACATCCAGATGACACAGAGCCCTAGCAGCCTGTCTG
CCTCTGTGGGCGATAGAGTGACCATCACCTGTCGGGCCTCTCAGAGCATCAACAGCTACCTGGA
CTGGTATCAGCAAAAGCCCGGCAAGGCCCCTAAGCTGCTGATCTATGCCGCTAGCTCTCTGCAG
TCTGGCGTGCCAAGCAGATTTTCTGGCAGCGGCTCTGGCACCGACTTCACCCTGACAATTTCTA
GCCTGCAGCCTGAGGACTTCGCCACCTACTACTGCCAGCAGTACTACAGCACCCCTTTCACATT
CGGCCCTGGCACAAAGGTGGAAATCAAGAGAACAGTGGCCGCTCCGAGCGTGTTCATCTTTCC
ACCTAGCGACGAGCAGCTGAAAAGCGGCACAGCCTCTGTCGTGTGCCTGCTGAACAACTTCTAC
CCTCGGGAAGCCAAGGTGCAGTGGAAAGTGGATAATGCCCTGCAGAGCGGCAACAGCCAAGAG
AGCGTGACAGAGCAGGATAGCAAGGACAGCACCTATAGCCTGAGCAGCACACTGACCCTGAGC
AAGGCCGACTACGAGAAGCACAAGGTGTACGCCTGCGAAGTGACACACCAGGGACTGAGCAGC
CCTGTGACCAAGAGCTTCAACAGAGGCGAGTGCTGA
Ipilimumab VL (SEQ ID NO: 74)
EIVLTQSPGTLSL SPGERATLSCRASQSVGSSYLAWYQQKPGQAPRLLIYGAFSRATGIPDRFSGSGSGTDFT
LTISRLEPEDFAVYYCQQYGSSPWTFGQGTKVEIKR
Ipilimumab VH (SEQ ID NO: 75)
QVQLVESGGGVVQPGRSLRLSCAASGFTFSSYTMHWVRQAPGKGLEWVTFISYDGNNKYYADSVKGRFT
ISRDNSKNTLYLQMNSLRAEDTAIYYCARTGWLGPFDYWGQGTLVT
Ipilimumab VL CDR1 (SEQ ID NO: 76)
QSVGSSYL
Ipilimumab VL CDR2 (SEQ ID NO: 77)
GAFS
Ipilimumab VL CDR3 (SEQ ID NO: 78)
QQYGSSPWT
Ipilimumab VH CDR1 (SEQ ID NO: 79)
SVGSSYL
Ipilimumab VH CDR2 (SEQ ID NO: 80)
GAFS
Ipilimumab VH CDR3 (SEQ ID NO: 81)
QQYGSSPWT
Full-Length ChAdVC68-MAG25mer-IRES-o9D9 sequence “chAd-MAG-CTLA4” (ChAdV68.5WTnt.MAG25mer
(SEQ ID NO: 57); AC_000011.1 with E1 (nt 577 to 3403) and E3 (nt 27, 125-31, 826) sequences deleted;
corresponding ATCC VR-594 nucleotides substituted at five positions; model neoantigen cassette and anti-CTLA4
clone 9D9 connected by an IRES sequence under the control of the CMV promoter/enhancer inserted in place of
deleted E1; SV40 polyA 3′ of cassette.

### XX. Co-Expression of an Anti-CTLA4 Immune Checkpoint Inhibitor Tumor Model Evaluation

[0599] Various dosing protocols using ChAdV68, with or without co-expression of anti-CTLA4 and optionally in combination with self-replicating RNA (srRNA), are evaluated in murine CT26 or B16—OVA tumor models.

[0600] Methods and Materials

### Tumor Injection

[0601] For B16—OVA tumor models, Balb/c mice are injected in the lower left abdominal flank with 105 B16—OVA cells/animal. Tumors are allowed to grow for 3 days prior to immunization.

[0602] For CT26 tumor models, Balb/c mice are injected in the lower left abdominal flank with 10⁶ CT26 cells/animal. Tumors are allowed to grow for 7 days prior to immunization.

### Immunizations

[0603] Mice are immunized with ChAdVC68-MAG25mer-IRES-o9D9 co-expressing a model antigen cassette (MAG) and an anti-CTLA4 antibody (o9D9), a vector that expresses the same model antigen cassette but does not express an anti-CTLA4 antibody, and/or the vector that expresses the same model antigen cassette but does not express an anti-CTLA4 antibody while being co-administered the 9D9 anti-CTLA4 antibody (purchased from BioXcell). In various study arms, mice receive a boosting immunization with an alphavirus vaccine vector expressing the same model antigens.

### Splenocyte Dissociation

[0604] Spleen and lymph nodes for each mouse are pooled in 3 mL of complete RPMI (RPMI, 10% FBS, penicillin/streptomycin). Mechanical dissociation is performed using the gentleMACS Dissociator (Miltenyi Biotec), following manufacturer's protocol. Dissociated cells are filtered through a 40 micron filter and red blood cells are lysed with ACK lysis buffer (150 mM NH₄Cl, 10 mM KHCO₃, 0.1 mM Na₂EDTA). Cells are filtered again through a 30 micron filter and then resuspended in complete RPMI. Cells are counted on the Attune NxT flow cytometer (Thermo Fisher) using propidium iodide staining to exclude dead and apoptotic cells. Cell are then adjusted to the appropriate concentration of live cells for subsequent analysis.

### Ex Vivo Enzyme-Linked Immunospot (ELISPOT) Analysis

[0605] ELISPOT analysis is performed according to ELISPOT harmonization guidelines {DO: 10.1038/nprot.2015.068} with the mouse IFNg ELISpotPLUS kit (MABTECH). 5×10⁴ splenocytes are incubated with 10 uM of the indicated peptides for 16 hours in 96-well IFNg antibody coated plates. Spots are developed using alkaline phosphatase. The reaction is timed for 10 minutes and is terminated by running plate under tap water. Spots are counted using an AID vSpot Reader Spectrum. For ELISPOT analysis, wells with saturation >50% were recorded as “too numerous to count”. Samples with deviation of replicate wells >10% are excluded from analysis. Spot counts are then corrected for well confluency using the formula: spot count+2×(spot count×% confluence/[100%−% confluence]). Negative background is corrected by subtraction of spot counts in the negative peptide stimulation wells from the antigen stimulated wells. Finally, wells labeled too numerous to count are set to the highest observed corrected value, rounded up to the nearest hundred.

[0606] Results

[0607] Mice in the various study arms are evaluated for cellular antigen-specific immune responses by ELISpot and ICS, anti-CTLA4 antibody levels in the serum, tumor growth, and survival. Immunization with ChAdVC68-MAG25mer-IRES-o9D9 demonstrates an improved immune response.

### XXI. Co-Expression of an Immune Checkpoint Inhibitor

[0608] In one example, a viral vector is designed to express both model antigens and an immune checkpoint inhibitor. The viral vector co-expressing the immune checkpoint inhibitor is compared to a vector that expresses the same model antigen cassette but does not express the immune checkpoint inhibitor, and/or the vector that expresses the same model antigen cassette but does not express the immune checkpoint inhibitor while being co-administered the immune checkpoint inhibitor. Other immune modulators are also tested in the same manner.

### Vector Design

[0609] In one example, an E1/E3 deleted ChAdV68 viral vector is designed with an expression cassette in the following orientation from 5′ to 3′ introduced into the deleted E1 region in the following format: [CMV—model-antigens/GFP—IRES—Immune Checkpoint Inhibitor—SV40]. Cassette expression is driven by a cytomegalovirus (CMV) promoter located 5′ of the model antigen cassette (or GFP reporter) and the SV-40 polyadenylation signal 3′ of the immune checkpoint inhibitor. The model antigen cassette is the MAG25mer cassette described above in Section XIV.B.4 (SEQ ID NO: 34). The antigen cassette (or GFP reporter) and the immune checkpoint inhibitor are separated by an IRES sequence, which enables separate translation of the model antigens and the are separated by an IRES sequence from the same transcript. The immune checkpoint inhibitor or immune modulator is based on available sequences, sequences obtained by peptide sequencing of available antibodies and subsequent design of nucleotide sequences for expression, or sequences obtained by BCR sequencing of hybridomas, for an anti-CTLA4 antibody or an antigen-binding fragment thereof, an anti-PD-1 antibody or an antigen-binding fragment thereof, an anti-PD-L1 antibody or an antigen-binding fragment thereof, an anti-4-1BB antibody or an antigen-binding fragment thereof, or an anti-OX-40 antibody or an antigen-binding fragment thereof. Immune checkpoint inhibitors and immune modulators that are available are described in Table 35 below. Sequences are also modified for expression, for example codon optimized or engineered for introduction into cloning vectors. The antibody encoding nucleotide sequence is designed in the following format: [heavy chain—Furin cleavage site—T2A site—light chain], as described (Fang J, Qian J J, Yi S, Harding T C, Tu G H, Van Roey M, Jooss K. (2005). Stable antibody expression at therapeutic levels using the 2A peptide. Nat Biotechnol. 23(5):584-90), where the T2A site is a Thosea asigna virus 2A peptide. The variable regions are appended to the constant region of mouse Ig isotype.

TABLE 35
Available immune checkpoint inhibitors

| Target | Clone | Source |
|---|---|---|
| 4-1BB | 3H3 | Bio X Cell BE0239 |
| 4-1BB | LOB12.3 | Bio X Cell BE0169 |
| OX40 | OX86 | Bio X Cell BE0031 |
| CTLA-4 | 9H10 | Bio X Cell BE0131 |
| PD-1 | RMP1-14 | Bio X Cell BE0146 |

[0610] In another example, an E1/E3 deleted ChAdV68 viral vector is designed with an expression cassette introduced into the deleted E1 region, as described above, and the immune checkpoint inhibitor is introduced into the deleted E3 region.

[0611] In another example, an alphavirus viral vector with the viral structural proteins deleted is designed with an expression cassette in the following orientation from 5′ to 3′ introduced into the deleted region in the following format: [model-antigens/GFP—RES—Immune Checkpoint Inhibitor]. The various immune checkpoint inhibitors tested in the alphavirus vector are the same as those tested in the adenoviral vector described above.

### Vector Production

[0612] The immune checkpoint inhibitor expressing viral vectors are generated by transfecting linearized vectors into 293A cells using Fugene 6 (Promega). The viral vectors undergo expansion in 293 cells before large scale production (400 mL scale) in 293F suspension cells. 48h post infection cells are harvested, lyzed and virus purified by two rounds of CsCl gradient. The virus is dialyzed into 20 mM Tris pH 8.0, 25 mM NaCl and 2.5% Glycerol. The purified viral vectors is aliquoted and stored at −80° C. The infectious unit titer of the purified viral vectors is determined using an anti-capsid assay. For in vitro and in vivo experiments, dosing was based on IU titers.

### In Vitro Expression

[0613] 293F cells are infected with the various viral vectors at an MOI of 1. Post infection, the supernatant is harvested, and the antibody recovered using Protein A beads. The antibody is eluted from the beads and separated on a 4-20% SDS-PAGE gel. The gel is subjected to Western Blot analysis using a goat anti-Mouse, HRP-conjugated antibody (Millipore, AP124P) at 1:2,500 dilution in TBST-5% dry milk, followed by chemiluminescent detection reagent (Thermofisher, ECL Plus).

### In Vivo Evaluation

[0614] Mice are immunized with the various viral vectors, delivered via bilateral intramuscular (IM) injections to the tibialis anterior muscles. Mice in select groups receiving the viral vector that does not express the immune checkpoint inhibitor are co-administered the immune checkpoint inhibitor. Antigen-specific T-cells are measured by ELISpot and intracellular cytokine staining. Serum is obtained at various timepoints and the immune checkpoint inhibitor concentration is measured by ELISA.

[0615] Results

[0616] The various viral vectors, including those co-expressing the immune checkpoint inhibitor, are produced and quantified. The viral vectors encoding the immune checkpoint inhibitors express the immune checkpoint inhibitor at detectable levels in vitro and in serum.

[0617] The various viral vectors co-expressing the immune checkpoint inhibitor result in immune activation that is equivalent to or greater than that achieved by vector without checkpoint inhibitor.

### Certain Sequences

[0618] Vectors, cassettes, and antibodies referred to herein are described below and referred to by SEQ ID NO.

Tremelimumab VL (SEQ ID NO: 16)
Tremelimumab VH (SEQ ID NO: 17)
Tremelimumab VH CDR1 (SEQ ID NO: 18)
Tremelimumab VH CDR2 (SEQ ID NO: 19)
Tremelimumab VH CDR3 (SEQ ID NO: 20)
Tremelimumab VL CDR1 (SEQ ID NO: 21)
Tremelimumab VL CDR2 (SEQ ID NO: 22)
Tremelimumab VL CDR3 (SEQ ID NO: 23)
Durvalumab (MEDI4736) VL (SEQ ID NO: 24)
MEDI4736 VH (SEQ ID NO: 25)
MEDI4736 VH CDR1 (SEQ ID NO: 26)
MEDI4736 VH CDR2 (SEQ ID NO: 27)
MEDI4736 VH CDR3 (SEQ ID NO: 28)
MEDI4736 VL CDR1 (SEQ ID NO: 29)
MEDI4736 VL CDR2 (SEQ ID NO: 30)
MEDI4736 VL CDR3 (SEQ ID NO: 31)
UbA76-25merPDTT nucleotide (SEQ ID NO: 32)
UbA76-25merPDTT polypeptide (SEQ ID NO: 33)
MAG-25merPDTT nucleotide (SEQ ID NO: 34)
MAG-25merPDTT polypeptide (SEQ ID NO: 35)
Ub7625merPDTT_NoSFL nucleotide (SEQ ID NO: 36)
Ub7625merPDTT_NoSFL polypeptide (SEQ ID NO: 37)
ChAdV68.5WTnt.MAG25mer (SEQ ID NO: 2); AC_000011.1 with E1 (nt 577 to 3403)
and E3 (nt 27,125-31,825) sequences deleted; corresponding ATCC VR-594
nucleotides substituted at five positions; model neoantigen cassette under
the control of the CMV promoter/enhancer inserted in place of deleted E1;
SV40 polyA 3′ of cassette
Venezuelan equine encephalitis virus [VEE] (SEQ ID NO: 3) GenBank: L01442.2
VEE-MAG25mer (SEQ ID NO: 4); contains MAG-25merPDTT nucleotide
(bases 30-1755)
Venezuelan equine encephalitis virus strain TC-83 [TC-83] (SEQ ID NO: 5)
GenBank: L01443.1
VEE Delivery Vector (SEQ ID NO: 6); VEE genome with nucleotides 7544-11175
deleted [alphavirus structural proteins removed]
TC-83 Delivery Vector(SEQ ID NO: 7); TC-83 genome with nucleotides 7544-
11175 deleted [alphavirus structural proteins removed]
VEE Production Vector (SEQ ID NO: 8); VEE genome with nucleotides 7544-
11175 deleted, plus 5′ T7-promoter, plus 3′ restriction sites
TC-83 Production Vector(SEQ ID NO: 9); TC-83 genome with nucleotides 7544-
11175 deleted, plus 5′ T7-promoter, plus 3′ restriction sites
VEE-UbAAY (SEQ ID NO: 14); VEE delivery vector with MHC class I mouse tumor
epitopes SIINFEKL (SEQ ID NO: 29362) and AH1-A5 inserted
VEE-Luciferase (SEQ ID NO: 15); VEE delivery vector with luciferase gene
inserted at 7545
ubiquitin (SEQ ID NO: 38) > UbG76 0-228
Ubiquitin A76 (SEQ ID NO: 39) > UbA76 0-228
HLA-A2 (MHC class I) signal peptide (SEQ ID NO: 40) > MHC SignalPep 0-78
HLA-A2 (MHC class I) Trans Membrane domain (SEQ ID NO: 41) > HLA A2 TM Domain
0-201
IgK Leader Seq (SEQ ID NO: 42) > IgK Leader Seq 0-60
Human DC-Lamp (SEQ ID NO: 43) > HumanDCLAMP 0-3178
Mouse LAMP1 (SEQ ID NO: 44) > MouseLamp1 0-1858
Human Lamp1 cDNA (SEQ ID NO: 45) > Human Lamp1 0-2339
Tetanus toxoid nulceic acid sequence (SEQ ID NO: 46)
Tetanus toxoid amino acid sequence (SEO ID NO: 47)
PADRE nulceotide sequence (SEQ ID NO: 48)
PADRE amino acid sequence (SEQ ID NO: 49)
WPRE (SEQ ID NO: 50) > WPRE 0-593
IRES (SEQ ID NO: 51) > eGFP_IRES_SEAP_Insert 1746-2335
GFP (SEQ ID NO: 52)
SEAP (SEQ ID NO: 53)
Firefly Luciferase (SEQ ID NO: 54)
FMDV 2A (SEQ ID NO: 55)

### REFERENCES

[0619] 1. Desrichard, A., Snyder, A. & Chan, T. A. Cancer Neoantigens and Applications for Immunotherapy. Clin. Cancer Res. Off. J. Am. Assoc. Cancer Res. (2015). doi:10.1158/1078-0432.CCR-14-3175
[0620] 2. Schumacher, T. N. & Schreiber, R. D. Neoantigens in cancer immunotherapy. Science 348, 69-74 (2015).
[0621] 3. Gubin, M. M., Artyomov, M. N., Mardis, E. R. & Schreiber, R. D. Tumor neoantigens: building a framework for personalized cancer immunotherapy. J. Clin. Invest. 125, 3413-3421 (2015).
[0622] 4. Rizvi, N. A. et al. Cancer immunology. Mutational landscape determines sensitivity to PD-1 blockade in non-small cell lung cancer. Science 348, 124-128 (2015).
[0623] 5. Snyder, A. et al. Genetic basis for clinical response to CTLA-4 blockade in melanoma. N. Engl. J. Med. 371, 2189-2199 (2014).
[0624] 6. Carreno, B. M. et al. Cancer immunotherapy. A dendritic cell vaccine increases the breadth and diversity of melanoma neoantigen-specific T cells. Science 348, 803-808 (2015).
[0625] 7. Tran, E. et al. Cancer immunotherapy based on mutation-specific CD4+ T cells in a patient with epithelial cancer. Science 344, 641-645 (2014).
[0626] 8. Hacohen, N. & Wu, C. J.-Y. United States Patent Application: 20110293637—COMPOSITIONS AND METHODS OF IDENTIFYING TUMOR SPECIFIC NEOANTIGENS. (A1). at <http://appft1.uspto.gov/netacgi/nph-Parser?Sect1=PTO1&Sect2=HITOFF&d=PG01&p=1&u=/netahtml/PTO/srchnum.html&r=1&f=G&l=50&sl=20110293637.PGNR.>
[0627] 9. Lundegaard, C., Hoof, I., Lund, O. & Nielsen, M. State of the art and challenges in sequence based T-cell epitope prediction. Immunome Res. 6 Suppl 2, S3 (2010).
[0628] 10. Yadav, M. et al. Predicting immunogenic tumour mutations by combining mass spectrometry and exome sequencing. Nature 515, 572-576 (2014).
[0629] 11. Bassani-Sternberg, M., Pletscher-Frankild, S., Jensen, L. J. & Mann, M. Mass spectrometry of human leukocyte antigen class I peptidomes reveals strong effects of protein abundance and turnover on antigen presentation. Mol. Cell. Proteomics MCP 14, 658-673 (2015).
[0630] 12. Van Allen, E. M. et al. Genomic correlates of response to CTLA-4 blockade in metastatic melanoma. Science 350, 207-211 (2015).
[0631] 13. Yoshida, K. & Ogawa, S. Splicing factor mutations and cancer. Wiley Interdiscip. Rev. RNA 5, 445-459 (2014).
[0632] 14. Cancer Genome Atlas Research Network. Comprehensive molecular profiling of lung adenocarcinoma. Nature 511, 543-550 (2014).
[0633] 15. Rajasagi, M. et al. Systematic identification of personal tumor-specific neoantigens in chronic lymphocytic leukemia. Blood 124, 453-462 (2014).
[0634] 16. Downing, S. R. et al. U.S. patent application: 0120208706—OPTIMIZATION OF MULTIGENE ANALYSIS OF TUMOR SAMPLES. (Al). at <http://appftl.uspto.gov/netacgi/nph-Parser?Sect1=PTO1&Sect2=HITOFF&d=PG01&p=1&u=/netahtml/PTO/srchnum.html&r=1&f=G&l=50&s1=20120208706.PGNR.>
[0635] 17. Target Capture for NextGen Sequencing—IDT. at <http://www.idtdna.com/pages/products/nextgen/target-capture>
[0636] 18. Shukla, S. A. et al. Comprehensive analysis of cancer-associated somatic mutations in class I HLA genes. Nat. Biotechnol. 33, 1152-1158 (2015).
[0637] 19. Cieslik, M. et al. The use of exome capture RNA-seq for highly degraded RNA with application to clinical cancer sequencing. Genome Res. 25, 1372-1381 (2015).
[0638] 20. Bodini, M. et al. The hidden genomic landscape of acute myeloid leukemia: subclonal structure revealed by undetected mutations. Blood 125, 600-605 (2015).
[0639] 21. Saunders, C. T. et al. Strelka: accurate somatic small-variant calling from sequenced tumor-normal sample pairs. Bioinforma. Oxf Engl. 28, 1811-1817 (2012).
[0640] 22. Cibulskis, K. et al. Sensitive detection of somatic point mutations in impure and heterogeneous cancer samples. Nat. Biotechnol. 31, 213-219 (2013).
[0641] 23. Wilkerson, M. D. et al. Integrated RNA and DNA sequencing improves mutation detection in low purity tumors. Nucleic Acids Res. 42, e107 (2014).
[0642] 24. Mose, L. E., Wilkerson, M. D., Hayes, D. N., Perou, C. M. & Parker, J. S. ABRA: improved coding indel detection via assembly-based realignment. Bioinforma. Oxf Engl. 30, 2813-2815 (2014).
[0643] 25. Ye, K., Schulz, M. H., Long, Q., Apweiler, R. & Ning, Z. Pindel: a pattern growth approach to detect break points of large deletions and medium sized insertions from paired-end short reads. Bioinforma. Oxf Engl. 25, 2865-2871 (2009).
[0644] 26. Lam, H. Y. K. et al. Nucleotide-resolution analysis of structural variants using BreakSeq and a breakpoint library. Nat. Biotechnol. 28, 47-55 (2010).
[0645] 27. Frampton, G. M. et al. Development and validation of a clinical cancer genomic profiling test based on massively parallel DNA sequencing. Nat. Biotechnol. 31, 1023-1031 (2013).
[0646] 28. Boegel, S. et al. HLA typing from RNA-Seq sequence reads. Genome Med. 4, 102 (2012).
[0647] 29. Liu, C. et al. ATHLATES: accurate typing of human leukocyte antigen through exome sequencing. Nucleic Acids Res. 41, e142 (2013).
[0648] 30. Mayor, N. P. et al. HLA Typing for the Next Generation. PloS One 10, e0127153 (2015).
[0649] 31. Roy, C. K., Olson, S., Graveley, B. R., Zamore, P. D. & Moore, M. J. Assessing long-distance RNA sequence connectivity via RNA-templated DNA-DNA ligation. eLife 4, (2015).
[0650] 32. Song, L. & Florea, L. CLASS: constrained transcript assembly of RNA-seq reads. BMC Bioinformatics 14 Suppl 5, S14 (2013).
[0651] 33. Maretty, L., Sibbesen, J. A. & Krogh, A. Bayesian transcriptome assembly. Genome Biol. 15, 501 (2014).
[0652] 34. Pertea, M. et al. StringTie enables improved reconstruction of a transcriptome from RNA-seq reads. Nat. Biotechnol. 33, 290-295 (2015).
[0653] 35. Roberts, A., Pimentel, H., Trapnell, C. & Pachter, L. Identification of novel transcripts in annotated genomes using RNA-Seq. Bioinforma. Oxf. Engl. (2011). doi:10.1093/bioinformatics/btr355
[0654] 36. Vitting-Seerup, K., Porse, B. T., Sandelin, A. & Waage, J. spliceR: an R package for classification of alternative splicing and prediction of coding potential from RNA-seq data. BMC Bioinformatics 15, 81 (2014).
[0655] 37. Rivas, M. A. et al. Human genomics. Effect of predicted protein-truncating genetic variants on the human transcriptome. Science 348, 666-669 (2015).
[0656] 38. Skelly, D. A., Johansson, M., Madeoy, J., Wakefield, J. & Akey, J. M. A powerful and flexible statistical framework for testing hypotheses of allele-specific gene expression from RNA-seq data. Genome Res. 21, 1728-1737 (2011).
[0657] 39. Anders, S., Pyl, P. T. & Huber, W. HTSeq—a Python framework to work with high-throughput sequencing data. Bioinforma. Oxf Engl. 31, 166-169 (2015).
[0658] 40. Furney, S. J. et al. SF3B1 mutations are associated with alternative splicing in uveal melanoma. Cancer Discov. (2013). doi:10.1158/2159-8290.CD-13-0330
[0659] 41. Zhou, Q. et al. A chemical genetics approach for the functional assessment of novel cancer genes. Cancer Res. (2015). doi:10.1158/0008-5472.CAN-14-2930
[0660] 42. Maguire, S. L. et al. SF3B1 mutations constitute a novel therapeutic target in breast cancer. J. Pathol. 235, 571-580 (2015).
[0661] 43. Carithers, L. J. et al. A Novel Approach to High-Quality Postmortem Tissue Procurement: The GTEx Project. Biopreservation Biobanking 13, 311-319 (2015).
[0662] 44. Xu, G. et al. RNA CoMPASS: a dual approach for pathogen and host transcriptome analysis of RNA-seq datasets. PloS One 9, e89445 (2014).
[0663] 45. Andreatta, M. & Nielsen, M. Gapped sequence alignment using artificial neural networks: application to the MHC class I system. Bioinforma. Oxf Engl. (2015). doi:10.1093/bioinformatics/btv639
[0664] 46. Jorgensen, K. W., Rasmussen, M., Buus, S. & Nielsen, M. NetMHCstab—predicting stability of peptide-MHC-I complexes; impacts for cytotoxic T lymphocyte epitope discovery. Immunology 141, 18-26 (2014).
[0665] 47. Larsen, M. V. et al. An integrative approach to CTL epitope prediction: a combined algorithm integrating MHC class I binding, TAP transport efficiency, and proteasomal cleavage predictions. Eur. J. Immunol. 35, 2295-2303 (2005).
[0666] 48. Nielsen, M., Lundegaard, C., Lund, O. & Keşmir, C. The role of the proteasome in generating cytotoxic T-cell epitopes: insights obtained from improved predictions of proteasomal cleavage. Immunogenetics 57, 33-41 (2005).
[0667] 49. Boisvert, F.-M. et al. A Quantitative Spatial Proteomics Analysis of Proteome Turnover in Human Cells. Mol. Cell. Proteomics 11, M111.011429-M111.011429 (2012).
[0668] 50. Duan, F. et al. Genomic and bioinformatic profiling of mutational neoepitopes reveals new rules to predict anticancer immunogenicity. J. Exp. Med. 211, 2231-2248 (2014).
[0669] 51. Janeway's Immunobiology: 9780815345312: Medicine & Health Science Books @Amazon.com. at <http://www.amazon.com/Janeways-Immunobiology-Kenneth-Murphy/dp/0815345313>
[0670] 52. Calis, J. J. A. et al. Properties of MHC Class I Presented Peptides That Enhance Immunogenicity. PLoS Comput. Biol. 9, e1003266 (2013).
[0671] 53. Zhang, J. et al. Intratumor heterogeneity in localized lung adenocarcinomas delineated by multiregion sequencing. Science 346, 256-259 (2014)
[0672] 54. Walter, M. J. et al. Clonal architecture of secondary acute myeloid leukemia. N. Engl. J. Med. 366, 1090-1098 (2012).
[0673] 55. Hunt D F, Henderson R A, Shabanowitz J, Sakaguchi K, Michel H, Sevilir N, Cox A L, Appella E, Engelhard V H. Characterization of peptides bound to the class I MHC molecule HLA-A2.1 by mass spectrometry. Science 1992. 255: 1261-1263.
[0674] 56. Zarling A L, Polefrone J M, Evans A M, Mikesh L M, Shabanowitz J, Lewis S T, Engelhard V H, Hunt D F. Identification of class I MHC-associated phosphopeptides as targets for cancer immunotherapy. Proc Natl Acad Sci USA. 2006 Oct. 3; 103(40):14889-94.
[0675] 57. Bassani-Sternberg M, Pletscher-Frankild S, Jensen L J, Mann M. Mass spectrometry of human leukocyte antigen class I peptidomes reveals strong effects of protein abundance and turnover on antigen presentation. Mol Cell Proteomics. 2015 March; 14(3):658-73. doi: 10.1074/mcp.M114.042812.
[0676] 58. Abelin J G, Trantham P D, Penny S A, Patterson A M, Ward S T, Hildebrand W H, Cobbold M, Bai D L, Shabanowitz J, Hunt D F. Complementary IMAC enrichment methods for HLA-associated phosphopeptide identification by mass spectrometry. Nat Protoc. 2015 September; 10(9):1308-18. doi: 10.1038/nprot.2015.086. Epub 2015 Aug. 6
[0677] 59. Barnstable C J, Bodmer W F, Brown G, Galfre G, Milstein C, Williams A F, Ziegler A. Production of monoclonal antibodies to group A erythrocytes, HLA and other human cell surface antigens-new tools for genetic analysis. Cell. 1978 May; 14(1):9-20.
[0678] 60. Goldman J M, Hibbin J, Kearney L, Orchard K, Th'ng K H. HLA-DR monoclonal antibodies inhibit the proliferation of normal and chronic granulocytic leukaemia myeloid progenitor cells. Br J Haematol. 1982 November; 52(3):411-20.
[0679] 61. Eng J K, Jahan T A, Hoopmann M R. Comet: an open-source MS/MS sequence database search tool. Proteomics. 2013 January; 13(1):22-4. doi: 10.1002/pmic.201200439. Epub 2012 Dec. 4.
[0680] 62. Eng J K, Hoopmann M R, Jahan T A, Egertson J D, Noble W S, MacCoss M J. A deeper look into Comet—implementation and features. J Am Soc Mass Spectrom. 2015 November; 26(11):1865-74. doi: 10.1007/s13361-015-1179-x. Epub 2015 Jun. 27.
[0681] 63. Lukas Kall, Jesse Canterbury, Jason Weston, William Stafford Noble and Michael J. MacCoss. Semi-supervised learning for peptide identification from shotgun proteomics datasets. Nature Methods 4:923-925, November 2007
[0682] 64. Lukas Kall, John D. Storey, Michael J. MacCoss and William Stafford Noble. Assigning confidence measures to peptides identified by tandem mass spectrometry. Journal of Proteome Research, 7(1):29-34, January 2008
[0683] 65. Lukas Kall, John D. Storey and William Stafford Noble. Nonparametric estimation of posterior error probabilities associated with peptides identified by tandem mass spectrometry. Bioinformatics, 24(16):i42-i48, August 2008
[0684] 66. Kinney R M, B J Johnson, V L Brown, D W Trent. Nucleotide Sequence of the 26 S mRNA of the Virulent Trinidad Donkey Strain of Venezuelan Equine Encephalitis Virus and Deduced Sequence of the Encoded Structural Proteins. Virology 152 (2), 400-413. 1986 Jul. 30.
[0685] 67. Jill E Slansky, Frederique M Rattis, Lisa F Boyd, Tarek Fahmy, Elizabeth M Jaffee, Jonathan P Schneck, David H Margulies, Drew M Pardoll. Enhanced Antigen-Specific Antitumor Immunity with Altered Peptide Ligands that Stabilize the MHC-Peptide-TCR Complex. Immunity, Volume 13, Issue 4, 1 Oct. 2000, Pages 529-538.
[0686] 68. A Y Huang, P H Gulden, A S Woods, M C Thomas, C D Tong, W Wang, V H Engelhard, G Pasternack, R Cotter, D Hunt, D M Pardoll, and E M Jaffee. The immunodominant major histocompatibility complex class I-restricted antigen of a murine colon tumor derives from an endogenous retroviral gene product. Proc Natl Acad Sci USA.; 93(18): 9730-9735, 1996 Sep. 3.
[0687] 69. JOHNSON, BARBARA J. B., RICHARD M. KINNEY, CRYSTLE L. KOST AND DENNIS W. TRENT. Molecular Determinants of Alphavirus Neurovirulence: Nucleotide and Deduced Protein Sequence Changes during Attenuation of Venezuelan Equine Encephalitis Virus. J Gen Virol 67:1951-1960, 1986.
[0688] 70. Aarnoudse, C. A., Kruse, M., Konopitzky, R., Brouwenstijn, N., and Schrier, P. I. (2002). TCR reconstitution in Jurkat reporter cells facilitates the identification of novel tumor antigens by cDNA expression cloning. Int J Cancer 99, 7-13.
[0689] 71. Alexander, J., Sidney, J., Southwood, S., Ruppert, J., Oseroff, C., Maewal, A., Snoke, K., Serra, H. M., Kubo, R. T., and Sette, A. (1994). Development of high potency universal DR-restricted helper epitopes by modification of high affinity DR-blocking peptides. Immunity 1, 751-761.
[0690] 72. Banu, N., Chia, A., Ho, Z. Z., Garcia, A. T., Paravasivam, K., Grotenbreg, G. M., Bertoletti, A., and Gehring, A. J. (2014). Building and optimizing a virus-specific T cell receptor library for targeted immunotherapy in viral infections. Scientific Reports 4, 4166.
[0691] 73. Cornet, S., Miconnet, I., Menez, J., Lemonnier, F., and Kosmatopoulos, K. (2006). Optimal organization of a polypeptide-based candidate cancer vaccine composed of cryptic tumor peptides with enhanced immunogenicity. Vaccine 24, 2102-2109.
[0692] 74. Depla, E., van der Aa, A., Livingston, B. D., Crimi, C., Allosery, K., de Brabandere, V., Krakover, J., Murthy, S., Huang, M., Power, S., et al. (2008). Rational design of a multiepitope vaccine encoding T-lymphocyte epitopes for treatment of chronic hepatitis B virus infections. Journal of Virology 82, 435-450.
[0693] 75. Ishioka, G. Y., Fikes, J., Hermanson, G., Livingston, B., Crimi, C., Qin, M., del Guercio, M. F., Oseroff, C., Dahlberg, C., Alexander, J., et al. (1999). Utilization of MHC class I transgenic mice for development of minigene DNA vaccines encoding multiple HLA-restricted CTL epitopes. J Immunol 162, 3915-3925.
[0694] 76. Janetzki, S., Price, L., Schroeder, H., Britten, C. M., Welters, M. J. P., and Hoos, A. (2015). Guidelines for the automated evaluation of Elispot assays. Nat Protoc 10, 1098-1115.
[0695] 77. Lyons, G. E., Moore, T., Brasic, N., Li, M., Roszkowski, J. J., and Nishimura, M. I. (2006). Influence of human CD8 on antigen recognition by T-cell receptor-transduced cells. Cancer Res 66, 11455-11461.
[0696] 78. Nagai, K., Ochi, T., Fujiwara, H., An, J., Shirakata, T., Mineno, J., Kuzushima, K., Shiku, H., Melenhorst, J. J., Gostick, E., et al. (2012). Aurora kinase A-specific T-cell receptor gene transfer redirects T lymphocytes to display effective antileukemia reactivity. Blood 119, 368-376.
[0697] 79. Panina-Bordignon, P., Tan, A., Termijtelen, A., Demotz, S., Corradin, G., and Lanzavecchia, A. (1989). Universally immunogenic T cell epitopes: promiscuous binding to human MHC class II and promiscuous recognition by T cells. Eur J Immunol 19, 2237-2242.
[0698] 80. Vitiello, A., Marchesini, D., Furze, J., Sherman, L. A., and Chesnut, R. W. (1991). Analysis of the HLA-restricted influenza-specific cytotoxic T lymphocyte response in transgenic mice carrying a chimeric human-mouse class I major histocompatibility complex. J Exp Med 173, 1007-1015.
[0699] 81. Yachi, P. P., Ampudia, J., Zal, T., and Gascoigne, N. R. J. (2006). Altered peptide ligands induce delayed CD8-T cell receptor interaction--a role for CD8 in distinguishing antigen quality. Immunity 25, 203-211.
[0700] 82. Pushko P, Parker M, Ludwig G V, Davis N L, Johnston R E, Smith J F. Replicon-helper systems from attenuated Venezuelan equine encephalitis virus: expression of heterologous genes in vitro and immunization against heterologous pathogens in vivo. Virology. 1997 Dec. 22; 239(2):389-401.
[0701] 83. Strauss, J H and E G Strauss. The alphaviruses: gene expression, replication, and evolution. Microbiol Rev. 1994 September; 58(3): 491-562.
[0702] 84. Rhéme C, Ehrengruber M U, Grandgirard D. Alphaviral cytotoxicity and its implication in vector development. Exp Physiol. 2005 January; 90(1):45-52. Epub 2004 Nov. 12.
[0703] 85. Riley, Michael K. II, and Wilfred Vermerris. Recent Advances in Nanomaterials for Gene Delivery—A Review. Nanomaterials 2017, 7(5), 94.
[0704] 86. Frolov I, Hardy R, Rice C M. Cis-acting RNA elements at the 5′ end of Sindbis virus genome RNA regulate minus- and plus-strand RNA synthesis. RNA. 2001 November; 7(11):1638-51.
[0705] 87. Jose J, Snyder J E, Kuhn R J. A structural and functional perspective of alphavirus replication and assembly. Future Microbiol. 2009 September; 4(7):837-56.
[0706] 88. Bo Li and C. olin N. Dewey. RSEM: accurate transcript quantification from RNA-Seq data with or without a referenfe genome. BMC Bioinformatics, 12:323, August 2011
[0707] 89. Hillary Pearson, Tariq Daouda, Diana Paola Granados, Chantal Durette, Eric Bonneil, Mathieu Courcelles, Anja Rodenbrock, Jean-Philippe Laverdure, Caroline Côté, Sylvie Mader, Sébastien Lemieux, Pierre Thibault, and Claude Perreault. MHC class I-associated peptides derive from selective regions of the human genome. The Journal of Clinical Investigation, 2016,
[0708] 90. Juliane Liepe, Fabio Marino, John Sidney, Anita Jeko, Daniel E. Bunting, Alessandro Sette, Peter M. Kloetzel, Michael P. H. Stumpf, Albert J. R. Heck, Michele Mishto. A large fraction of HLA class I ligands are proteasome-generated spliced peptides. Science, 21, October 2016.
[0709] 91. Mommen G P., Marino, F., Meiring H D., Poelen, M C., van Gaans-van den Brink, J A., Mohammed S., Heck A J., and van Els C A. Sampling From the Proteome to the Human Leukocyte Antigen-DR (HLA-DR) Ligandome Proceeds Via High Specificity. Mol Cell Proteomics 15(4): 1412-1423, April 2016.
[0710] 92. Sebastian Kreiter, Mathias Vormehr, Niels van de Roemer, Mustafa Diken, Martin Löwer, Jan Diekmann, Sebastian Boegel, Barbara Schrörs, Fulvia Vascotto, John C. Castle, Arbel D. Tadmor, Stephen P. Schoenberger, Christoph Huber, Özlem Tureci, and Ugur Sahin. Mutant MHC class II epitopes drive therapeutic immune responses to caner. Nature 520, 692-696, April 2015.
[0711] 93. Tran E., Turcotte S., Gros A., Robbins P. F., Lu Y. C., Dudley M. E., Wunderlich J. R., Somerville R. P., Hogan K., Hinrichs C. S., Parkhurst M. R., Yang J. C., Rosenberg S. A. Cancer immunotherapy based on mutation-specific CD4+ T cells in a patient with epithelial cancer. Science 344(6184) 641-645, May 2014.
[0712] 94. Andreatta M., Karosiene E., Rasmussen M., Stryhn A., Buus S., Nielsen M. Accurate pan-specific prediction of peptide-MHC class II binding affinity with improved binding core identification. Immunogenetics 67(11-12) 641-650, November 2015.
[0713] 95. Nielsen, M., Lund, O. NN-align. An artificial neural network-based alignment algorithm for MHC class II peptide binding prediction. BMC Bioinformatics 10:296, September 2009.
[0714] 96. Nielsen, M., Lundegaard, C., Lund, O. Prediction of MHC class II binding affinity using SMM-align, a novel stabilization matrix alignment method. BMC Bioinformatics 8:238, July 2007.
[0715] 97. Zhang, J., et al. PEAKS DB: de novo sequencing assisted database search for sensitive and accurate peptide identification. Molecular & Cellular Proteomics. 11(4):1-8. Jan. 2, 2012.
[0716] 98. Jensen, Kamilla Kjaergaard, et al. “Improved Methods for Prediting Peptide Binding Affinity to MHC Class II Molecules.” Immunology, 2018, doi:10.1111/imm.12889.
[0717] 99. Carter, S. L., Cibulskis, K., Helman, E., McKenna, A., Shen, H., Zack, T., Laird, P. W., Onofrio, R. C., Winckler, W., Weir, B. A., et al. (2012). Absolute quantification of somatic DNA alterations in human cancer. Nat. Biotechnol. 30, 413-421
[0718] 100. McGranahan, N., Rosenthal, R., Hiley, C. T., Rowan, A. J., Watkins, T. B. K., Wilson, G. A., Birkbak, N. J., Veeriah, S., Van Loo, P., Herrero, J., et al. (2017). Allele-Specific HLA Loss and Immune Escape in Lung Cancer Evolution. Cell 171, 1259-1271.el 1.
[0719] 101. Shukla, S. A., Rooney, M. S., Rajasagi, M., Tiao, G., Dixon, P. M., Lawrence, M. S., Stevens, J., Lane, W. J., Dellagatta, J. L., Steelman, S., et al. (2015). Comprehensive analysis of cancer-associated somatic mutations in class I HLA genes. Nat. Biotechnol. 33, 1152-1158.
[0720] 102. Van Loo, P., Nordgard, S. H., Lingjorde, O. C., Russnes, H. G., Rye, I. H., Sun, W., Weigman, V. J., Marynen, P., Zetterberg, A., Naume, B., et al. (2010). Allele-specific copy number analysis of tumors. Proc. Natl. Acad. Sci. U.S.A 107, 16910-16915.
[0721] 103. Van Loo, P., Nordgard, S. H., Lingjorde, O. C., Russnes, H. G., Rye, I. H., Sun, W., Weigman, V. J., Marynen, P., Zetterberg, A., Naume, B., et al. (2010). Allele-specific copy number analysis of tumors. Proc. Natl. Acad. Sci. U.S.A 107, 16910-16915.

The application's sequence listing, which the Patent Office published only in electronic form, follows.

SEQUENCE LISTING (225 sequences)

SEQ ID NO: 1 - DNA, 36519 bp, Artificial Sequence
  Description of Artificial Sequence: Synthetic polynucleotide
ccatcttcaataatatacctcaaactttttgtgcgcgttaatatgcaaatgaggcgtttgaatttggggaggaagggcggtgattggtcgagggatgagcgaccgttaggggcggggcgagtgacgttttgatgacgtggttgcgaggaggagccagtttgcaagttctcgtgggaaaagtgacgtcaaacgaggtgtggtttgaacacggaaatactcaattttcccgcgctctctgacaggaaatgaggtgtttctgggcggatgcaagtgaaaacgggccattttcgcgcgaaaactgaatgaggaagtgaaaatctgagtaatttcgcgtttatggcagggaggagtatttgccgagggccgagtagactttgaccgattacgtgggggtttcgattaccgtgtttttcacctaaatttccgcgtacggtgtcaaagtccggtgtttttacgtaggtgtcagctgatcgccagggtatttaaacctgcgctctccagtcaagaggccactcttgagtgccagcgagaagagttttctcctccgcgccgcgagtcagatctacactttgaaagatgaggcacctgagagacctgcccgatgagaaaatcatcatcgcttccgggaacgagattctggaactggtggtaaatgccatgatgggcgacgaccctccggagccccccaccccatttgagacaccttcgctgcacgatttgtatgatctggaggtggatgtgcccgaggacgatcccaatgaggaggcggtaaatgatttttttagcgatgccgcgctgctagctgccgaggaggcttcgagctctagctcagacagcgactcttcactgcatacccctagacccggcagaggtgagaaaaagatccccgagcttaaaggggaagagatggacttgcgctgctatgaggaatgcttgcccccgagcgatgatgaggacgagcaggcgatccagaacgcagcgagccagggagtgcaagccgccagcgagagctttgcgctggactgcccgcctctgcccggacacggctgtaagtcttgtgaatttcatcgcatgaatactggagataaagctgtgttgtgtgcactttgctatatgagagcttacaaccattgtgtttacagtaagtgtgattaagttgaactttagagggaggcagagagcagggtgactgggcgatgactggtttatttatgtatatatgttctttatataggtcccgtctctgacgcagatgatgagacccccactacaaagtccacttcgtcacccccagaaattggcacatctccacctgagaatattgttagaccagttcctgttagagccactgggaggagagcagctgtggaatgtttggatgacttgctacagggtggggttgaacctttggacttgtgtacccggaaacgccccaggcactaagtgccacacatgtgtgtttacttgaggtgatgtcagtatttatagggtgtggagtgcaataaaaaatgtgttgactttaagtgcgtggtttatgactcaggggtggggactgtgagtatataagcaggtgcagacctgtgtggttagctcagagcggcatggagatttggacggtcttggaagactttcacaagactagacagctgctagagaacgcctcgaacggagtctcttacctgtggagattctgcttcggtggcgacctagctaggctagtctacagggccaaacaggattatagtgaacaatttgaggttattttgagagagtgttctggtctttttgacgctcttaacttgggccatcagtctcactttaaccagaggatttcgagagcccttgattttactactcctggcagaaccactgcagcagtagccttttttgcttttattcttgacaaatggagtcaagaaacccatttcagcagggattaccagctggatttcttagcagtagctttgtggagaacatggaagtgccagcgcctgaatgcaatctccggctacttgccggtacagccgctagacactctgaggatcctgaatctccaggagagtcccagggcacgccaacgtcgccagcagcagcagcaggaggaggatcaagaagagaacccgagagccggcctggaccctccggcggaggaggaggagtagctgacctgtttcctgaactgcgccgggtgctgactaggtcttcgagtggtcgggagagggggattaagcgggagaggcatgatgagactaatcacagaactgaactgactgtgggtctgatgagtcgcaagcgcccagaaacagtgtggtggcatgaggtgcagtcgactggcacagatgaggtgtcggtgatgcatgagaggttttctctagaacaagtcaagacttgttggttagagcctgaggatgattgggaggtagccatcaggaattatgccaagctggctctgaggccagacaagaagtacaagattactaagctgataaatatcagaaatgcctgctacatctcagggaatggggctgaagtggagatctgtctccaggaaagggtggctttcagatgctgcatgatgaatatgtacccgggagtggtgggcatggatggggttacctttatgaacatgaggttcaggggagatgggtataatggcacggtctttatggccaataccaagctgacagtccatggctgctccttctttgggtttaataacacctgcatcgaggcctggggtcaggtcggtgtgaggggctgcagtttttcagccaactggatgggggtcgtgggcaggaccaagagtatgctgtccgtgaagaaatgcttgtttgagaggtgccacctgggggtgatgagcgagggcgaagccagaatccgccactgcgcctctaccgagacgggctgctttgtgctgtgcaagggcaatgctaagatcaagcataatatgatctgtggagcctcggacgagcgcggctaccagatgctgacctgcgccggcgggaacagccatatgctggccaccgtacatgtggcttcccatgctcgcaagccctggcccgagttcgagcacaatgtcatgaccaggtgcaatatgcatctggggtcccgccgaggcatgttcatgccctaccagtgcaacctgaattatgtgaaggtgctgctggagcccgatgccatgtccagagtgagcctgacgggggtgtttgacatgaatgtggaggtgtggaagattctgagatatgatgaatccaagaccaggtgccgagcctgcgagtgcggagggaagcatgccaggttccagcccgtgtgtgtggatgtgacggaggacctgcgacccgatcatttggtgttgccctgcaccgggacggagttcggttccagcggggaagaatctgactagagtgagtagtgttctggggcgggggaggacctgcatgagggccagaataactgaaatctgtgcttttctgtgtgttgcagcagcatgagcggaagcggctcctttgagggaggggtattcagcccttatctgacggggcgtctcccctcctgggcgggagtgcgtcagaatgtgatgggatccacggtggacggccggcccgtgcagcccgcgaactcttcaaccctgacctatgcaaccctgagctcttcgtcgttggacgcagctgccgccgcagctgctgcatctgccgccagcgccgtgcgcggaatggccatgggcgccggctactacggcactctggtggccaactcgagttccaccaataatcccgccagcctgaacgaggagaagctgttgctgctgatggcccagctcgaggccttgacccagcgcctgggcgagctgacccagcaggtggctcagctgcaggagcagacgcgggccgcggttgccacggtgaaatccaaataaaaaatgaatcaataaataaacggagacggttgttgattttaacacagagtctgaatctttatttgatttttcgcgcgcggtaggccctggaccaccggtctcgatcattgagcacccggtggatcttttccaggacccggtagaggtgggcttggatgttgaggtacatgggcatgagcccgtcccgggggtggaggtagctccattgcagggcctcgtgctcgggggtggtgttgtaaatcacccagtcatagcaggggcgcagggcatggtgttgcacaatatctttgaggaggagactgatggccacgggcagccctttggtgtaggtgtttacaaatctgttgagctgggagggatgcatgcggggggagatgaggtgcatcttggcctggatcttgagattggcgatgttaccgcccagatcccgcctggggttcatgttgtgcaggaccaccagcacggtgtatccggtgcacttggggaatttatcatgcaacttggaagggaaggcgtgaaagaatttggcgacgcctttgtgcccgcccaggttttccatgcactcatccatgatgatggcgatgggcccgtgggcggcggcctgggcaaagacgtttcgggggtcggacacatcatagttgtggtcctgggtgaggtcatcataggccattttaatgaatttggggcggagggtgccggactgggggacaaaggtaccctcgatcccgggggcgtagttcccctcacagatctgcatctcccaggctttgagctcggagggggggatcatgtccacctgcggggcgataaagaacacggtttccggggcgggggagatgagctgggccgaaagcaagttccggagcagctgggacttgccgcagccggtggggccgtagatgaccccgatgaccggctgcaggtggtagttgagggagagacagctgccgtcctcccggaggaggggggccacctcgttcatcatctcgcgcacgtgcatgttctcgcgcaccagttccgccaggaggcgctctccccccagggataggagctcctggagcgaggcgaagtttttcagcggcttgagtccgtcggccatgggcattttggagagggtttgttgcaagagttccaggcggtcccagagctcggtgatgtgctctacggcatctcgatccagcagacctcctcgtttcgcgggttgggacggctgcgggagtagggcaccagacgatgggcgtccagcgcagccagggtccggtccttccagggtcgcagcgtccgcgtcagggtggtctccgtcacggtgaaggggtgcgcgccgggctgggcgcttgcgagggtgcgcttcaggctcatccggctggtcgaaaaccgctcccgatcggcgccctgcgcgtcggccaggtagcaattgaccatgagttcgtagttgagcgcctcggccgcgtggcctttggcgcggagcttacctttggaagtctgcccgcaggcgggacagaggagggacttgagggcgtagagcttgggggcgaggaagacggactcgggggcgtaggcgtccgcgccgcagtgggcgcagacggtctcgcactccacgagccaggtgaggtcgggctggtcggggtcaaaaaccagtttcccgccgttctttttgatgcgtttcttacctttggtctccatgagctcgtgtccccgctgggtgacaaagaggctgtccgtgtccccgtagaccgactttatgggccggtcctcgagcggtgtgccgcggtcctcctcgtagaggaaccccgcccactccgagacgaaagcccgggtccaggccagcacgaaggaggccacgtgggacgggtagcggtcgttgtccaccagcgggtccaccttttccagggtatgcaaacacatgtccccctcgtccacatccaggaaggtgattggcttgtaagtgtaggccacgtgaccgggggtcccggccgggggggtataaaagggtgcgggtccctgctcgtcctcactgtcttccggatcgctgtccaggagcgccagctgttggggtaggtattccctctcgaaggcgggcatgacctcggcactcaggttgtcagtttctagaaacgaggaggatttgatattgacggtgccggcggagatgcctttcaagagcccctcgtccatctggtcagaaaagacgatctttttgttgtcgagcttggtggcgaaggagccgtagagggcgttggagaggagcttggcgatggagcgcatggtctggtttttttccttgtcggcgcgctccttggcggcgatgttgagctgcacgtactcgcgcgccacgcacttccattcggggaagacggtggtcagctcgtcgggcacgattctgacctgccagccccgattatgcagggtgatgaggtccacactggtggccacctcgccgcgcaggggctcattagtccagcagaggcgtccgcccttgcgcgagcagaaggggggcagggggtccagcatgacctcgtcgggggggtcggcatcgatggtgaagatgccgggcaggaggtcggggtcaaagtagctgatggaagtggccagatcgtccagggcagcttgccattcgcgcacggccagcgcgcgctcgtagggactgaggggcgtgccccagggcatgggatgggtaagcgcggaggcgtacatgccgcagatgtcgtagacgtagaggggctcctcgaggatgccgatgtaggtggggtagcagcgccccccgcggatgctggcgcgcacgtagtcatacagctcgtgcgagggggcgaggagccccgggcccaggttggtgcgactgggcttttcggcgcggtagacgatctggcggaaaatggcatgcgagttggaggagatggtgggcctttggaagatgttgaagtgggcgtggggcagtccgaccgagtcgcggatgaagtgggcgtaggagtcttgcagcttggcgacgagctcggcggtgactaggacgtccagagcgcagtagtcgagggtctcctggatgatgtcatacttgagctgtcccttttgtttccacagctcgcggttgagaaggaactcttcgcggtccttccagtactcttcgagggggaacccgtcctgatctgcacggtaagagcctagcatgtagaactggttgacggccttgtaggcgcagcagcccttctccacggggagggcgtaggcctgggcggccttgcgcagggaggtgtgcgtgagggcgaaagtgtccctgaccatgaccttgaggaactggtgcttgaagtcgatatcgtcgcagcccccctgctcccagagctggaagtccgtgcgcttcttgtaggcggggttgggcaaagcgaaagtaacatcgttgaagaggatcttgcccgcgcggggcataaagttgcgagtgatgcggaaaggttggggcacctcggcccggttgttgatgacctgggcggcgagcacgatctcgtcgaagccgttgatgttgtggcccacgatgtagagttccacgaatcgcggacggcccttgacgtggggcagtttcttgagctcctcgtaggtgagctcgtcggggtcgctgagcccgtgctgctcgagcgcccagtcggcgagatgggggttggcgcggaggaaggaagtccagagatccacggccagggcggtttgcagacggtcccggtactgacggaactgctgcccgacggccattttttcgggggtgacgcagtagaaggtgcgggggtccccgtgccagcgatcccatttgagctggagggcgagatcgagggcgagctcgacgagccggtcgtccccggagagtttcatgaccagcatgaaggggacgagctgcttgccgaaggaccccatccaggtgtaggtttccacatcgtaggtgaggaagagcctttcggtgcgaggatgcgagccgatggggaagaactggatctcctgccaccaattggaggaatggctgttgatgtgatggaagtagaaatgccgacggcgcgccgaacactcgtgcttgtgtttatacaagcggccacagtgctcgcaacgctgcacgggatgcacgtgctgcacgagctgtacctgagttcctttgacgaggaatttcagtgggaagtggagtcgtggcgcctgcatctcgtgctgtactacgtcgtggtggtcggcctggccctcttctgcctcgatggtggtcatgctgacgagcccgcgcgggaggcaggtccagacctcggcgcgagcgggtcggagagcgaggacgagggcgcgcaggccggagctgtccagggtcctgagacgctgcggagtcaggtcagtgggcagcggcggcgcgcggttgacttgcaggagtttttccagggcgcgcgggaggtccagatggtacttgatctccaccgcgccattggtggcgacgtcgatggcttgcagggtcccgtgcccctggggtgtgaccaccgtcccccgtttcttcttgggcggctggggcgacgggggcggtgcctcttccatggttagaagcggcggcgaggacgcgcgccgggcggcaggggcggctcggggcccggaggcaggggcggcaggggcacgtcggcgccgcgcgcgggtaggttctggtactgcgcccggagaagactggcgtgagcgacgacgcgacggttgacgtcctggatctgacgcctctgggtgaaggccacgggacccgtgagtttgaacctgaaagagagttcgacagaatcaatctcggtatcgttgacggcggcctgccgcaggatctcttgcacgtcgcccgagttgtcctggtaggcgatctcggtcatgaactgctcgatctcctcctcttgaaggtctccgcggccggcgcgctccacggtggccgcgaggtcgttggagatgcggcccatgagctgcgagaaggcgttcatgcccgcctcgttccagacgcggctgtagaccacgacgccctcgggatcgcgggcgcgcatgaccacctgggcgaggttgagctccacgtggcgcgtgaagaccgcgtagttgcagaggcgctggtagaggtagttgagcgtggtggcgatgtgctcggtgacgaagaaatacatgatccagcggcggagcggcatctcgctgacgtcgcccagcgcctccaaacgttccatggcctcgtaaaagtccacggcgaagttgaaaaactgggagttgcgcgccgagacggtcaactcctcctccagaagacggatgagctcggcgatggtggcgcgcacctcgcgctcgaaggcccccgggagttcctccacttcctcttcttcctcctccactaacatctcttctacttcctcctcaggcggcagtggtggcgggggagggggcctgcgtcgccggcggcgcacgggcagacggtcgatgaagcgctcgatggtctcgccgcgccggcgtcgcatggtctcggtgacggcgcgcccgtcctcgcggggccgcagcgtgaagacgccgccgcgcatctccaggtggccgggggggtccccgttgggcagggagagggcgctgacgatgcatcttatcaattgccccgtagggactccgcgcaaggacctgagcgtctcgagatccacgggatctgaaaaccgctgaacgaaggcttcgagccagtcgcagtcgcaaggtaggctgagcacggtttcttctggcgggtcatgttggttgggagcggggcgggcgatgctgctggtgatgaagttgaaataggcggttctgagacggcggatggtggcgaggagcaccaggtctttgggcccggcttgctggatgcgcagacggtcggccatgccccaggcgtggtcctgacacctggccaggtccttgtagtagtcctgcatgagccgctccacgggcacctcctcctcgcccgcgcggccgtgcatgcgcgtgagcccgaagccgcgctggggctggacgagcgccaggtcggcgacgacgcgctcggcgaggatggcttgctggatctgggtgagggtggtctggaagtcatcaaagtcgacgaagcggtggtaggctccggtgttgatggtgtaggagcagttggccatgacggaccagttgacggtctggtggcccggacgcacgagctcgtggtacttgaggcgcgagtaggcgcgcgtgtcgaagatgtagtcgttgcaggtgcgcaccaggtactggtagccgatgaggaagtgcggcggcggctggcggtagagcggccatcgctcggtggcgggggcgccgggcgcgaggtcctcgagcatggtgcggtggtagccgtagatgtacctggacatccaggtgatgccggcggcggtggtggaggcgcgcgggaactcgcggacgcggttccagatgttgcgcagcggcaggaagtagttcatggtgggcacggtctggcccgtgaggcgcgcgcagtcgtggatgctctatacgggcaaaaacgaaagcggtcagcggctcgactccgtggcctggaggctaagcgaacgggttgggctgcgcgtgtaccccggttcgaatctcgaatcaggctggagccgcagctaacgtggtattggcactcccgtctcgacccaagcctgcaccaaccctccaggatacggaggcgggtcgttttgcaacttttttttggaggccggatgagactagtaagcgcggaaagcggccgaccgcgatggctcgctgccgtagtctggagaagaatcgccagggttgcgttgcggtgtgccccggttcgaggccggccggattccgcggctaacgagggcgtggctgccccgtcgtttccaagaccccatagccagccgacttctccagttacggagcgagcccctcttttgttttgtttgtttttgccagatgcatcccgtactgcggcagatgcgcccccaccaccctccaccgcaacaacagccccctccacagccggcgcttctgcccccgccccagcagcaacttccagccacgaccgccgcggccgccgtgagcggggctggacagagttatgatcaccagctggccttggaagagggcgaggggctggcgcgcctgggggcgtcgtcgccggagcggcacccgcgcgtgcagatgaaaagggacgctcgcgaggcctacgtgcccaagcagaacctgttcagagacaggagcggcgaggagcccgaggagatgcgcgcggcccggttccacgcggggcgggagctgcggcgcggcctggaccgaaagagggtgctgagggacgaggatttcgaggcggacgagctgacggggatcagccccgcgcgcgcgcacgtggccgcggccaacctggtcacggcgtacgagcagaccgtgaaggaggagagcaacttccaaaaatccttcaacaaccacgtgcgcaccctgatcgcgcgcgaggaggtgaccctgggcctgatgcacctgtgggacctgctggaggccatcgtgcagaaccccaccagcaagccgctgacggcgcagctgttcctggtggtgcagcatagtcgggacaacgaagcgttcagggaggcgctgctgaatatcaccgagcccgagggccgctggctcctggacctggtgaacattctgcagagcatcgtggtgcaggagcgcgggctgccgctgtccgagaagctggcggccatcaacttctcggtgctgagtttgggcaagtactacgctaggaagatctacaagaccccgtacgtgcccatagacaaggaggtgaagatcgacgggttttacatgcgcatgaccctgaaagtgctgaccctgagcgacgatctgggggtgtaccgcaacgacaggatgcaccgtgcggtgagcgccagcaggcggcgcgagctgagcgaccaggagctgatgcatagtctgcagcgggccctgaccggggccgggaccgagggggagagctactttgacatgggcgcggacctgcactggcagcccagccgccgggccttggaggcggcggcaggaccctacgtagaagaggtggacgatgaggtggacgaggagggcgagtacctggaagactgatggcgcgaccgtatttttgctagatgcaacaacaacagccacctcctgatcccgcgatgcgggcggcgctgcagagccagccgtccggcattaactcctcggacgattggacccaggccatgcaacgcatcatggcgctgacgacccgcaaccccgaagcctttagacagcagccccaggccaaccggctctcggccatcctggaggccgtggtgccctcgcgctccaaccccacgcacgagaaggtcctggccatcgtgaacgcgctggtggagaacaaggccatccgcggcgacgaggccggcctggtgtacaacgcgctgctggagcgcgtggcccgctacaacagcaccaacgtgcagaccaacctggaccgcatggtgaccgacgtgcgcgaggccgtggcccagcgcgagcggttccaccgcgagtccaacctgggatccatggtggcgctgaacgccttcctcagcacccagcccgccaacgtgccccggggccaggaggactacaccaacttcatcagcgccctgcgcctgatggtgaccgaggtgccccagagcgaggtgtaccagtccgggccggactacttcttccagaccagtcgccagggcttgcagaccgtgaacctgagccaggctttcaagaacttgcagggcctgtggggcgtgcaggccccggtcggggaccgcgcgacggtgtcgagcctgctgacgccgaactcgcgcctgctgctgctgctggtggcccccttcacggacagcggcagcatcaaccgcaactcgtacctgggctacctgattaacctgtaccgcgaggccatcggccaggcgcacgtggacgagcagacctaccaggagatcacccacgtgagccgcgccctgggccaggacgacccgggcaacctggaagccaccctgaactttttgctgaccaaccggtcgcagaagatcccgccccagtacgcgctcagcaccgaggaggagcgcatcctgcgttacgtgcagcagagcgtgggcctgttcctgatgcaggagggggccacccccagcgccgcgctcgacatgaccgcgcgcaacatggagcccagcatgtacgccagcaaccgcccgttcatcaataaactgatggactacttgcatcgggcggccgccatgaactctgactatttcaccaacgccatcctgaatccccactggctcccgccgccggggttctacacgggcgagtacgacatgcccgaccccaatgacgggttcctgtgggacgatgtggacagcagcgtgttctccccccgaccgggtgctaacgagcgccccttgtggaagaaggaaggcagcgaccgacgcccgtcctcggcgctgtccggccgcgagggtgctgccgcggcggtgcccgaggccgccagtcctttcccgagcttgcccttctcgctgaacagtatccgcagcagcgagctgggcaggatcacgcgcccgcgcttgctgggcgaagaggagtacttgaatgactcgctgttgagacccgagcgggagaagaacttccccaataacgggatagaaagcctggtggacaagatgagccgctggaagacgtatgcgcaggagcacagggacgatccccgggcgtcgcagggggccacgagccggggcagcgccgcccgtaaacgccggtggcacgacaggcagcggggacagatgtgggacgatgaggactccgccgacgacagcagcgtgttggacttgggtgggagtggtaacccgttcgctcacctgcgcccccgtatcgggcgcatgatgtaagagaaaccgaaaataaatgatactcaccaaggccatggcgaccagcgtgcgttcgtttcttctctgttgttgttgtatctagtatgatgaggcgtgcgtacccggagggtcctcctccctcgtacgagagcgtgatgcagcaggcgatggcggcggcggcgatgcagcccccgctggaggctccttacgtgcccccgcggtacctggcgcctacggaggggcggaacagcattcgttactcggagctggcacccttgtacgataccacccggttgtacctggtggacaacaagtcggcggacatcgcctcgctgaactaccagaacgaccacagcaacttcctgaccaccgtggtgcagaacaatgacttcacccccacggaggccagcacccagaccatcaactttgacgagcgctcgcggtggggcggccagctgaaaaccatcatgcacaccaacatgcccaacgtgaacgagttcatgtacagcaacaagttcaaggcgcgggtgatggtctcccgcaagacccccaatggggtgacagtgacagaggattatgatggtagtcaggatgagctgaagtatgaatgggtggaatttgagctgcccgaaggcaacttctcggtgaccatgaccatcgacctgatgaacaacgccatcatcgacaattacttggcggtggggcggcagaacggggtgctggagagcgacatcggcgtgaagttcgacactaggaacttcaggctgggctgggaccccgtgaccgagctggtcatgcccggggtgtacaccaacgaggctttccatcccgatattgtcttgctgcccggctgcggggtggacttcaccgagagccgcctcagcaacctgctgggcattcgcaagaggcagcccttccaggaaggcttccagatcatgtacgaggatctggaggggggcaacatccccgcgctcctggatgtcgacgcctatgagaaaagcaaggaggatgcagcagctgaagcaactgcagccgtagctaccgcctctaccgaggtcaggggcgataattttgcaagcgccgcagcagtggcagcggccgaggcggctgaaaccgaaagtaagatagtcattcagccggtggagaaggatagcaagaacaggagctacaacgtactaccggacaagataaacaccgcctaccgcagctggtacctagcctacaactatggcgaccccgagaagggcgtgcgctcctggacgctgctcaccacctcggacgtcacctgcggcgtggagcaagtctactggtcgctgcccgacatgatgcaagacccggtcaccttccgctccacgcgtcaagttagcaactacccggtggtgggcgccgagctcctgcccgtctactccaagagcttcttcaacgagcaggccgtctactcgcagcagctgcgcgccttcacctcgcttacgcacgtcttcaaccgcttccccgagaaccagatcctcgtccgcccgcccgcgcccaccattaccaccgtcagtgaaaacgttcctgctctcacagatcacgggaccctgccgctgcgcagcagtatccggggagtccagcgcgtgaccgttactgacgccagacgccgcacctgcccctacgtctacaaggccctgggcatagtcgcgccgcgcgtcctctcgagccgcaccttctaaatgtccattctcatctcgcccagtaataacaccggttggggcctgcgcgcgcccagcaagatgtacggaggcgctcgccaacgctccacgcaacaccccgtgcgcgtgcgcgggcacttccgcgctccctggggcgccctcaagggccgcgtgcggtcgcgcaccaccgtcgacgacgtgatcgaccaggtggtggccgacgcgcgcaactacacccccgccgccgcgcccgtctccaccgtggacgccgtcatcgacagcgtggtggccgacgcgcgccggtacgcccgcgccaagagccggcggcggcgcatcgcccggcggcaccggagcacccccgccatgcgcgcggcgcgagccttgctgcgcagggccaggcgcacgggacgcagggccatgctcagggcggccagacgcgcggcttcaggcgccagcgccggcaggacccggagacgcgcggccacggcggcggcagcggccatcgccagcatgtcccgcccgcggcgagggaacgtgtactgggtgcgcgacgccgccaccggtgtgcgcgtgcccgtgcgcacccgcccccctcgcacttgaagatgttcacttcgcgatgttgatgtgtcccagcggcgaggaggatgtccaagcgcaaattcaaggaagagatgctccaggtcatcgcgcctgagatctacggccctgcggtggtgaaggaggaaagaaagccccgcaaaatcaagcgggtcaaaaaggacaaaaaggaagaagaaagtgatgtggacggattggtggagtttgtgcgcgagttcgccccccggcggcgcgtgcagtggcgcgggcggaaggtgcaaccggtgctgagacccggcaccaccgtggtcttcacgcccggcgagcgctccggcaccgcttccaagcgctcctacgacgaggtgtacggggatgatgatattctggagcaggcggccgagcgcctgggcgagtttgcttacggcaagcgcagccgttccgcaccgaaggaagaggcggtgtccatcccgctggaccacggcaaccccacgccgagcctcaagcccgtgaccttgcagcaggtgctgccgaccgcggcgccgcgccgggggttcaagcgcgagggcgaggatctgtaccccaccatgcagctgatggtgcccaagcgccagaagctggaagacgtgctggagaccatgaaggtggacccggacgtgcagcccgaggtcaaggtgcggcccatcaagcaggtggccccgggcctgggcgtgcagaccgtggacatcaagattcccacggagcccatggaaacgcagaccgagcccatgatcaagcccagcaccagcaccatggaggtgcagacggatccctggatgccatcggctcctagtcgaagaccccggcgcaagtacggcgcggccagcctgctgatgcccaactacgcgctgcatccttccatcatccccacgccgggctaccgcggcacgcgcttctaccgcggtcataccagcagccgccgccgcaagaccaccactcgccgccgccgtcgccgcaccgccgctgcaaccacccctgccgccctggtgcggagagtgtaccgccgcggccgcgcacctctgaccctgccgcgcgcgcgctaccacccgagcatcgccatttaaactttcgcctgctttgcagatcaatggccctcacatgccgccttcgcgttcccattacgggctaccgaggaagaaaaccgcgccgtagaaggctggcggggaacgggatgcgtcgccaccaccaccggcggcggcgcgccatcagcaagcggttggggggaggcttcctgcccgcgctgatccccatcatcgccgcggcgatcggggcgatccccggcattgcttccgtggcggtgcaggcctctcagcgccactgagacacacttggaaacatcttgtaataaaccaatggactctgacgctcctggtcctgtgatgtgttttcgtagacagatggaagacatcaatttttcgtccctggctccgcgacacggcacgcggccgttcatgggcacctggagcgacatcggcaccagccaactgaacgggggcgccttcaattggagcagtctctggagcgggcttaagaatttcgggtccacgcttaaaacctatggcagcaaggcgtggaacagcaccacagggcaggcgctgagggataagctgaaagagcagaacttccagcagaaggtggtcgatgggctcgcctcgggcatcaacggggtggtggacctggccaaccaggccgtgcagcggcagatcaacagccgcctggacccggtgccgcccgccggctccgtggagatgccgcaggtggaggaggagctgcctcccctggacaagcggggcgagaagcgaccccgccccgatgcggaggagacgctgctgacgcacacggacgagccgcccccgtacgaggaggcggtgaaactgggtctgcccaccacgcggcccatcgcgcccctggccaccggggtgctgaaacccgaaaagcccgcgaccctggacttgcctcctccccagccttcccgcccctctacagtggctaagcccctgccgccggtggccgtggcccgcgcgcgacccgggggcaccgcccgccctcatgcgaactggcagagcactctgaacagcatcgtgggtctgggagtgcagagtgtgaagcgccgccgctgctattaaacctaccgtagcgcttaacttgcttgtctgtgtgtgtatgtattatgtcgccgccgccgctgtccaccagaaggaggagtgaagaggcgcgtcgccgagttgcaagatggccaccccatcgatgctgccccagtgggcgtacatgcacatcgccggacaggacgcttcggagtacctgagtccgggtctggtgcagtttgcccgcgccacagacacctacttcagtctggggaacaagtttaggaaccccacggtggcgcccacgcacgatgtgaccaccgaccgcagccagcggctgacgctgcgcttcgtgcccgtggaccgcgaggacaacacctactcgtacaaagtgcgctacacgctggccgtgggcgacaaccgcgtgctggacatggccagcacctactttgacatccgcggcgtgctggatcggggccctagcttcaaaccctactccggcaccgcctacaacagtctggcccccaagggagcacccaacacttgtcagtggacatataaagccgatggtgaaactgccacagaaaaaacctatacatatggaaatgcacccgtgcagggcattaacatcacaaaagatggtattcaacttggaactgacaccgatgatcagccaatctacgcagataaaacctatcagcctgaacctcaagtgggtgatgctgaatggcatgacatcactggtactgatgaaaagtatggaggcagagctcttaagcctgataccaaaatgaagccttgttatggttcttttgccaagcctactaataaagaaggaggtcaggcaaatgtgaaaacaggaacaggcactactaaagaatatgacatagacatggctttctttgacaacagaagtgcggctgctgctggcctagctccagaaattgttttgtatactgaaaatgtggatttggaaactccagatacccatattgtatacaaagcaggcacagatgacagcagctcttctattaatttgggtcagcaagccatgcccaacagacctaactacattggtttcagagacaactttatcgggctcatgtactacaacagcactggcaatatgggggtgctggccggtcaggcttctcagctgaatgctgtggttgacttgcaagacagaaacaccgagctgtcctaccagctcttgcttgactctctgggtgacagaacccggtatttcagtatgtggaatcaggcggtggacagctatgatcctgatgtgcgcattattgaaaatcatggtgtggaggatgaacttcccaactattgtttccctctggatgctgttggcagaacagatacttatcagggaattaaggctaatggaactgatcaaaccacatggaccaaagatgacagtgtcaatgatgctaatgagataggcaagggtaatccattcgccatggaaatcaacatccaagccaacctgtggaggaacttcctctacgccaacgtggccctgtacctgcccgactcttacaagtacacgccggccaatgttaccctgcccaccaacaccaacacctacgattacatgaacggccgggtggtggcgccctcgctggtggactcctacatcaacatcggggcgcgctggtcgctggatcccatggacaacgtgaaccccttcaaccaccaccgcaatgcggggctgcgctaccgctccatgctcctgggcaacgggcgctacgtgcccttccacatccaggtgccccagaaatttttcgccatcaagagcctcctgctcctgcccgggtcctacacctacgagtggaacttccgcaaggacgtcaacatgatcctgcagagctccctcggcaacgacctgcgcacggacggggcctccatctccttcaccagcatcaacctctacgccaccttcttccccatggcgcacaacacggcctccacgctcgaggccatgctgcgcaacgacaccaacgaccagtccttcaacgactacctctcggcggccaacatgctctaccccatcccggccaacgccaccaacgtgcccatctccatcccctcgcgcaactgggccgccttccgcggctggtccttcacgcgtctcaagaccaaggagacgccctcgctgggctccgggttcgacccctacttcgtctactcgggctccatcccctacctcgacggcaccttctacctcaaccacaccttcaagaaggtctccatcaccttcgactcctccgtcagctggcccggcaacgaccggctcctgacgcccaacgagttcgaaatcaagcgcaccgtcgacggcgagggctacaacgtggcccagtgcaacatgaccaaggactggttcctggtccagatgctggcccactacaacatcggctaccagggcttctacgtgcccgagggctacaaggaccgcatgtactccttcttccgcaacttccagcccatgagccgccaggtggtggacgaggtcaactacaaggactaccaggccgtcaccctggcctaccagcacaacaactcgggcttcgtcggctacctcgcgcccaccatgcgccagggccagccctaccccgccaactacccctacccgctcatcggcaagagcgccgtcaccagcgtcacccagaaaaagttcctctgcgacagggtcatgtggcgcatccccttctccagcaacttcatgtccatgggcgcgctcaccgacctcggccagaacatgctctatgccaactccgcccacgcgctagacatgaatttcgaagtcgaccccatggatgagtccacccttctctatgttgtcttcgaagtcttcgacgtcgtccgagtgcaccagccccaccgcggcgtcatcgaggccgtctacctgcgcacccccttctcggccggtaacgccaccacctaagctcttgcttcttgcaagccatggccgcgggctccggcgagcaggagctcagggccatcatccgcgacctgggctgcgggccctacttcctgggcaccttcgataagcgcttcccgggattcatggccccgcacaagctggcctgcgccatcgtcaacacggccggccgcgagaccgggggcgagcactggctggccttcgcctggaacccgcgctcgaacacctgctacctcttcgaccccttcgggttctcggacgagcgcctcaagcagatctaccagttcgagtacgagggcctgctgcgccgcagcgccctggccaccgaggaccgctgcgtcaccctggaaaagtccacccagaccgtgcagggtccgcgctcggccgcctgcgggctcttctgctgcatgttcctgcacgccttcgtgcactggcccgaccgccccatggacaagaaccccaccatgaacttgctgacgggggtgcccaacggcatgctccagtcgccccaggtggaacccaccctgcgccgcaaccaggaggcgctctaccgcttcctcaactcccactccgcctactttcgctcccaccgcgcgcgcatcgagaaggccaccgccttcgaccgcatgaatcaagacatgtaaaccgtgtgtgtatgttaaatgtctttaataaacagcactttcatgttacacatgcatctgagatgatttatttagaaatcgaaagggttctgccgggtctcggcatggcccgcgggcagggacacgttgcggaactggtacttggccagccacttgaactcggggatcagcagtttgggcagcggggtgtcggggaaggagtcggtccacagcttccgcgtcagttgcagggcgcccagcaggtcgggcgcggagatcttgaaatcgcagttgggacccgcgttctgcgcgcgggagttgcggtacacggggttgcagcactggaacaccatcagggccgggtgcttcacgctcgccagcaccgtcgcgtcggtgatgctctccacgtcgaggtcctcggcgttggccatcccgaagggggtcatcttgcaggtctgccttcccatggtgggcacgcacccgggcttgtggttgcaatcgcagtgcagggggatcagcatcatctgggcctggtcggcgttcatccccgggtacatggccttcatgaaagcctccaattgcctgaacgcctgctgggccttggctccctcggtgaagaagaccccgcaggacttgctagagaactggttggtggcgcacccggcgtcgtgcacgcagcagcgcgcgtcgttgttggccagctgcaccacgctgcgcccccagcggttctgggtgatcttggcccggtcggggttctccttcagcgcgcgctgcccgttctcgctcgccacatccatctcgatcatgtgctccttctggatcatggtggtcccgtgcaggcaccgcagcttgccctcggcctcggtgcacccgtgcagccacagcgcgcacccggtgcactcccagttcttgtgggcgatctgggaatgcgcgtgcacgaagccctgcaggaagcggcccatcatggtggtcagggtcttgttgctagtgaaggtcagcggaatgccgcggtgctcctcgttgatgtacaggtggcagatgcggcggtacacctcgccctgctcgggcatcagctggaagttggctttcaggtcggtctccacgcggtagcggtccatcagcatagtcatgatttccatacccttctcccaggccgagacgatgggcaggctcatagggttcttcaccatcatcttagcgctagcagccgcggccagggggtcgctctcgtccagggtctcaaagctccgcttgccgtccttctcggtgatccgcaccggggggtagctgaagcccacggccgccagctcctcctcggcctgtctttcgtcctcgctgtcctggctgacgtcctgcaggaccacatgcttggtcttgcggggtttcttcttgggcggcagcggcggcggagatgttggagatggcgagggggagcgcgagttctcgctcaccactactatctcttcctcttcttggtccgaggccacgcggcggtaggtatgtctcttcgggggcagaggcggaggcgacgggctctcgccgccgcgacttggcggatggctggcagagccccttccgcgttcgggggtgcgctcccggcggcgctctgactgacttcctccgcggccggccattgtgttctcctagggaggaacaacaagcatggagactcagccatcgccaacctcgccatctgcccccaccgccgacgagaagcagcagcagcagaatgaaagcttaaccgccccgccgcccagccccgccacctccgacgcggccgtcccagacatgcaagagatggaggaatccatcgagattgacctgggctatgtgacgcccgcggagcacgaggaggagctggcagtgcgcttttcacaagaagagatacaccaagaacagccagagcaggaagcagagaatgagcagagtcaggctgggctcgagcatgacggcgactacctccacctgagcgggggggaggacgcgctcatcaagcatctggcccggcaggccaccatcgtcaaggatgcgctgctcgaccgcaccgaggtgcccctcagcgtggaggagctcagccgcgcctacgagttgaacctcttctcgccgcgcgtgccccccaagcgccagcccaatggcacctgcgagcccaacccgcgcctcaacttctacccggtcttcgcggtgcccgaggccctggccacctaccacatctttttcaagaaccaaaagatccccgtctcctgccgcgccaaccgcacccgcgccgacgcccttttcaacctgggtcccggcgcccgcctacctgatatcgcctccttggaagaggttcccaagatcttcgagggtctgggcagcgacgagactcgggccgcgaacgctctgcaaggagaaggaggagagcatgagcaccacagcgccctggtcgagttggaaggcgacaacgcgcggctggcggtgctcaaacgcacggtcgagctgacccatttcgcctacccggctctgaacctgccccccaaagtcatgagcgcggtcatggaccaggtgctcatcaagcgcgcgtcgcccatctccgaggacgagggcatgcaagactccgaggagggcaagcccgtggtcagcgacgagcagctggcccggtggctgggtcctaatgctagtccccagagtttggaagagcggcgcaaactcatgatggccgtggtcctggtgaccgtggagctggagtgcctgcgccgcttcttcgccgacgcggagaccctgcgcaaggtcgaggagaacctgcactacctcttcaggcacgggttcgtgcgccaggcctgcaagatctccaacgtggagctgaccaacctggtctcctacatgggcatcttgcacgagaaccgcctggggcagaacgtgctgcacaccaccctgcgcggggaggcccggcgcgactacatccgcgactgcgtctacctctacctctgccacacctggcagacgggcatgggcgtgtggcagcagtgtctggaggagcagaacctgaaagagctctgcaagctcctgcagaagaacctcaagggtctgtggaccgggttcgacgagcgcaccaccgcctcggacctggccgacctcattttccccgagcgcctcaggctgacgctgcgcaacggcctgcccgactttatgagccaaagcatgttgcaaaactttcgctctttcatcctcgaacgctccggaatcctgcccgccacctgctccgcgctgccctcggacttcgtgccgctgaccttccgcgagtgccccccgccgctgtggagccactgctacctgctgcgcctggccaactacctggcctaccactcggacgtgatcgaggacgtcagcggcgagggcctgctcgagtgccactgccgctgcaacctctgcacgccgcaccgctccctggcctgcaacccccagctgctgagcgagacccagatcatcggcaccttcgagttgcaagggcccagcgaaggcgagggttcagccgccaaggggggtctgaaactcaccccggggctgtggacctcggcctacttgcgcaagttcgtgcccgaggactaccatcccttcgagatcaggttctacgaggaccaatcccatccgcccaaggccgagctgtcggcctgcgtcatcacccagggggcgatcctggcccaattgcaagccatccagaaatcccgccaagaattcttgctgaaaaagggccgcggggtctacctcgacccccagaccggtgaggagctcaaccccggcttcccccaggatgccccgaggaaacaagaagctgaaagtggagctgccgcccgtggaggatttggaggaagactgggagaacagcagtcaggcagaggaggaggagatggaggaagactgggacagcactcaggcagaggaggacagcctgcaagacagtctggaggaagacgaggaggaggcagaggaggaggtggaagaagcagccgccgccagaccgtcgtcctcggcgggggagaaagcaagcagcacggataccatctccgctccgggtcggggtcccgctcgaccacacagtagatgggacgagaccggacgattcccgaaccccaccacccagaccggtaagaaggagcggcagggatacaagtcctggcgggggcacaaaaacgccatcgtctcctgcttgcaggcctgcgggggcaacatctccttcacccggcgctacctgctcttccaccgcggggtgaactttccccgcaacatcttgcattactaccgtcacctccacagcccctactacttccaagaagaggcagcagcagcagaaaaagaccagcagaaaaccagcagctagaaaatccacagcggcggcagcaggtggactgaggatcgcggcgaacgagccggcgcaaacccgggagctgaggaaccggatctttcccaccctctatgccatcttccagcagagtcgggggcaggagcaggaactgaaagtcaagaaccgttctctgcgctcgctcacccgcagttgtctgtatcacaagagcgaagaccaacttcagcgcactctcgaggacgccgaggctctcttcaacaagtactgcgcgctcactcttaaagagtagcccgcgcccgcccagtcgcagaaaaaggcgggaattacgtcacctgtgcccttcgccctagccgcctccacccatcatcatgagcaaagagattcccacgccttacatgtggagctaccagccccagatgggcctggccgccggtgccgcccaggactactccacccgcatgaattggctcagcgccgggcccgcgatgatctcacgggtgaatgacatccgcgcccaccgaaaccagatactcctagaacagtcagcgctcaccgccacgccccgcaatcacctcaatccgcgtaattggcccgccgccctggtgtaccaggaaattccccagcccacgaccgtactacttccgcgagacgcccaggccgaagtccagctgactaactcaggtgtccagctggcgggcggcgccaccctgtgtcgtcaccgccccgctcagggtataaagcggctggtgatccggggcagaggcacacagctcaacgacgaggtggtgagctcttcgctgggtctgcgacctgacggagtcttccaactcgccggatcggggagatcttccttcacgcctcgtcaggccgtcctgactttggagagttcgtcctcgcagccccgctcgggtggcatcggcactctccagttcgtggaggagttcactccctcggtctacttcaaccccttctccggctcccccggccactacccggacgagttcatcccgaacttcgacgccatcagcgagtcggtggacggctacgattgaatgtcccatggtggcgcagctgacctagctcggcttcgacacctggaccactgccgccgcttccgctgcttcgctcgggatctcgccgagtttgcctactttgagctgcccgaggagcaccctcagggcccggcccacggagtgcggatcgtcgtcgaagggggcctcgactcccacctgcttcggatcttcagccagcgtccgatcctggtcgagcgcgagcaaggacagacccttctgactctgtactgcatctgcaaccaccccggcctgcatgaaagtctttgttgtctgctgtgtactgagtataataaaagctgagatcagcgactactccggacttccgtgtgttcctgaatccatcaaccagtctttgttcttcaccgggaacgagaccgagctccagctccagtgtaagccccacaagaagtacctcacctggctgttccagggctccccgatcgccgttgtcaaccactgcgacaacgacggagtcctgctgagcggccctgccaaccttactttttccacccgcagaagcaagctccagctcttccaacccttcctccccgggacctatcagtgcgtctcgggaccctgccatcacaccttccacctgatcccgaataccacagcgtcgctccccgctactaacaaccaaactaacctccaccaacgccaccgtcgcgacctttctgaatctaatactaccacccacaccggaggtgagctccgaggtcaaccaacctctgggatttactacggcccctgggaggtggttgggttaatagcgctaggcctagttgcgggtgggcttttggttctctgctacctatacctcccttgctgttcgtacttagtggtgctgtgttgctggtttaagaaatggggaagatcaccctagtgagctgcggtgcgctggtggcggtgttgctttcgattgtgggactgggcggtgcggctgtagtgaaggagaaggccgatccctgcttgcatttcaatcccaacaaatgccagctgagttttcagcccgatggcaatcggtgcgcggtactgatcaagtgcggatgggaatgcgagaacgtgagaatcgagtacaataacaagactcggaacaatactctcgcgtccgtgtggcagcccggggaccccgagtggtacaccgtctctgtccccggtgctgacggctccccgcgcaccgtgaataatactttcatttttgcgcacatgtgcgacacggtcatgtggatgagcaagcagtacgatatgtggccccccacgaaggagaacatcgtggtcttctccatcgcttacagcctgtgcacggcgctaatcaccgctatcgtgtgcctgagcattcacatgctcatcgctattcgccccagaaataatgccgaaaaagaaaaacagccataacgttttttttcacacctttttcagaccatggcctctgttaaatttttgcttttatttgccagtctcattgccgtcattcatggaatgagtaatgagaaaattactatttacactggcactaatcacacattgaaaggtccagaaaaagccacagaagtttcatggtattgttattttaatgaatcagatgtatctactgaactctgtggaaacaataacaaaaaaaatgagagcattactctcatcaagtttcaatgtggatctgacttaaccctaattaacatcactagagactatgtaggtatgtattatggaactacagcaggcatttcggacatggaattttatcaagtttctgtgtctgaacccaccacgcctagaatgaccacaaccacaaaaactacacctgttaccactatgcagctcactaccaataacatttttgccatgcgtcaaatggtcaacaatagcactcaacccaccccacccagtgaggaaattcccaaatccatgattggcattattgttgctgtagtggtgtgcatgttgatcatcgccttgtgcatggtgtactatgccttctgctacagaaagcacagactgaacgacaagctggaacacttactaagtgttgaattttaattttttagaaccatgaagatcctaggccttttaattttttctatcattacctctgctctatgcaattctgacaatgaggacgttactgtcgttgtcggatcaaattatacactgaaaggtccagcgaagggtatgctttcgtggtattgctattttggatctgacactacagaaactgaattatgcaatcttaagaatggcaaaattcaaaattctaaaattaacaattatatatgcaatggtactgatctgatactcctcaatatcacgaaatcatatgctggcagttacacctgccctggagatgatgctgacagtatgattttttacaaagtaactgttgttgatcccactactccacctccacccaccacaactactcacaccacacacacagatcaaaccgcagcagaggaggcagcaaagttagccttgcaggtccaagacagttcatttgttggcattacccctacacctgatcagcggtgtccggggctgctagtcagcggcattgtcggtgtgctttcgggattagcagtcataatcatctgcatgttcatttttgcttgctgctatagaaggctttaccgacaaaaatcagacccactgctgaacctctatgtttaattttttccagagtcatgaaggcagttagcgctctagttttttgttctttgattggcattgttttttgcaatcctattcctaaagttagctttattaaagatgtgaatgttactgaggggggcaatgtgacactggtaggtgtagagggtgctgaaaacaccacctggacaaaataccacctcaatgggtggaaagatatttgcaattggagtgtattagtttatacatgtgagggagttaatcttaccattgtcaatgccacctcagctcaaaatggtagaattcaaggacaaagtgtcagtgtatctaatgggtattttacccaacatacttttatctatgacgttaaagtcataccactgcctacgcctagcccacctagcactaccacacagacaacccacactacacagacaaccacatacagtacattaaatcagcctaccaccactacagcagcagaggttgccagctcgtctggggtccgagtggcatttttgatgtgggccccatctagcagtcccactgctagtaccaatgagcagactactgaatttttgtccactgtcgagagccacaccacagctacctccagtgccttctctagcaccgccaatctctcctcgctttcctctacaccaatcagtcccgctactactcctagccccgctcctcttcccactcccctgaagcaaacagacggcggcatgcaatggcagatcaccctgctcattgtgatcgggttggtcatcctggccgtgttgctctactacatcttctgccgccgcattcccaacgcgcaccgcaagccggtctacaagcccatcattgtcgggcagccggagccgcttcaggtggaagggggtctaaggaatcttctcttctcttttacagtatggtgattgaactatgattcctagacaattcttgatcactattcttatctgcctcctccaagtctgtgccaccctcgctctggtggccaacgccagtccagactgtattgggcccttcgcctcctacgtgctctttgccttcaccacctgcatctgctgctgtagcatagtctgcctgcttatcaccttcttccagttcattgactggatctttgtgcgcatcgcctacctgcgccaccacccccagtaccgcgaccagcgagtggcgcggctgctcaggctcctctgataagcatgcgggctctgctacttctcgcgcttctgctgttagtgctcccccgtcccgtcgacccccggtcccccacccagtcccccgaggaggtccgcaaatgcaaattccaagaaccctggaaattcctcaaatgctaccgccaaaaatcagacatgcatcccagctggatcatgatcattgggatcgtgaacattctggcctgcaccctcatctcctttgtgatttacccctgctttgactttggttggaactcgccagaggcgctctatctcccgcctgaacctgacacaccaccacagcaacctcaggcacacgcactaccaccactacagcctaggccacaatacatgcccatattagactatgaggccgagccacagcgacccatgctccccgctattagttacttcaatctaaccggcggagatgactgacccactggccaacaacaacgtcaacgaccttctcctggacatggacggccgcgcctcggagcagcgactcgcccaacttcgcattcgccagcagcaggagagagccgtcaaggagctgcaggatgcggtggccatccaccagtgcaagagaggcatcttctgcctggtgaaacaggccaagatctcctacgaggtcactccaaacgaccatcgcctctcctacgagctcctgcagcagcgccagaagttcacctgcctggtcggagtcaaccccatcgtcatcacccagcagtctggcgataccaaggggtgcatccactgctcctgcgactcccccgactgcgtccacactctgatcaagaccctctgcggcctccgcgacctcctccccatgaactaatcacccccttatccagtgaaataaagatcatattgatgatgattttacagaaataaaaaataatcatttgatttgaaataaagatacaatcatattgatgatttgagtttaacaaaaaaataaagaatcacttacttgaaatctgataccaggtctctgtccatgttttctgccaacaccacttcactcccctcttcccagctctggtactgcaggccccggcgggctgcaaacttcctccacacgctgaaggggatgtcaaattcctcctgtccctcaatcttcattttatcttctatcagatgtccaaaaagcgcgtccgggtggatgatgacttcgaccccgtctacccctacgatgcagacaacgcaccgaccgtgcccttcatcaacccccccttcgtctcttcagatggattccaagagaagcccctgggggtgttgtccctgcgactggccgaccccgtcaccaccaagaacggggaaatcaccctcaagctgggagagggggtggacctcgattcctcgggaaaactcatctccaacacggccaccaaggccgccgcccctctcagtttttccaacaacaccatttcccttaacatggatcaccccttttacactaaagatggaaaattatccttacaagtttctccaccattaaatatactgagaacaagcattctaaacacactagctttaggttttggatcaggtttaggactccgtggctctgccttggcagtacagttagtctctccacttacatttgatactgatggaaacataaagcttaccttagacagaggtttgcatgttacaacaggagatgcaattgaaagcaacataagctgggctaaaggtttaaaatttgaagatggagccatagcaaccaacattggaaatgggttagagtttggaagcagtagtacagaaacaggtgttgatgatgcttacccaatccaagttaaacttggatctggccttagctttgacagtacaggagccataatggctggtaacaaagaagacgataaactcactttgtggacaacacctgatccatcaccaaactgtcaaatactcgcagaaaatgatgcaaaactaacactttgcttgactaaatgtggtagtcaaatactggccactgtgtcagtcttagttgtaggaagtggaaacctaaaccccattactggcaccgtaagcagtgctcaggtgtttctacgttttgatgcaaacggtgttcttttaacagaacattctacactaaaaaaatactgggggtataggcagggagatagcatagatggcactccatataccaatgctgtaggattcatgcccaatttaaaagcttatccaaagtcacaaagttctactactaaaaataatatagtagggcaagtatacatgaatggagatgtttcaaaacctatgcttctcactataaccctcaatggtactgatgacagcaacagtacatattcaatgtcattttcatacacctggactaatggaagctatgttggagcaacatttggggctaactcttataccttctcatacatcgcccaagaatgaacactgtatcccaccctgcatgccaacccttcccaccccactctgtggaacaaactctgaaacacaaaataaaataaagttcaagtgttttattgattcaacagttttacaggattcgagcagttatttttcctccaccctcccaggacatggaatacaccaccctctccccccgcacagccttgaacatctgaatgccattggtgatggacatgcttttggtctccacgttccacacagtttcagagcgagccagtctcgggtcggtcagggagatgaaaccctccgggcactcccgcatctgcacctcacagctcaacagctgaggattgtcctcggtggtcgggatcacggttatctggaagaagcagaagagcggcggtgggaatcatagtccgcgaacgggatcggccggtggtgtcgcatcaggccccgcagcagtcgctgccgccgccgctccgtcaagctgctgctcagggggtccgggtccagggactccctcagcatgatgcccacggccctcagcatcagtcgtctggtgcggcgggcgcagcagcgcatgcggatctcgctcaggtcgctgcagtacgtgcaacacagaaccaccaggttgttcaacagtccatagttcaacacgctccagccgaaactcatcgcgggaaggatgctacccacgtggccgtcgtaccagatcctcaggtaaatcaagtggtgccccctccagaacacgctgcccacgtacatgatctccttgggcatgtggcggttcaccacctcccggtaccacatcaccctctggttgaacatgcagccccggatgatcctgcggaaccacagggccagcaccgccccgcccgccatgcagcgaagagaccccgggtcccggcaatggcaatggaggacccaccgctcgtacccgtggatcatctgggagctgaacaagtctatgttggcacagcacaggcatatgctcatgcatctcttcagcactctcaactcctcgggggtcaaaaccatatcccagggcacggggaactcttgcaggacagcgaaccccgcagaacagggcaatcctcgcacagaacttacattgtgcatggacagggtatcgcaatcaggcagcaccgggtgatcctccaccagagaagcgcgggtctcggtctcctcacagcgtggtaagggggccggccgatacgggtgatggcgggacgcggctgatcgtgttcgcgaccgtgtcatgatgcagttgctttcggacattttcgtacttgctgtagcagaacctggtccgggcgctgcacaccgatcgccggcggcggtctcggcgcttggaacgctcggtgttgaaattgtaaaacagccactctctcagaccgtgcagcagatctagggcctcaggagtgatgaagatcccatcatgcctgatggctctgatcacatcgaccaccgtggaatgggccagacccagccagatgatgcaattttgttgggtttcggtgacggcgggggagggaagaacaggaagaaccatgattaacttttaatccaaacggtctcggagtacttcaaaatgaagatcgcggagatggcacctctcgcccccgctgtgttggtggaaaataacagccaggtcaaaggtgatacggttctcgagatgttccacggtggcttccagcaaagcctccacgcgcacatccagaaacaagacaatagcgaaagcgggagggttctctaattcctcaatcatcatgttacactcctgcaccatccccagataattttcatttttccagccttgaatgattcgaactagttcctgaggtaaatccaagccagccatgataaagagctcgcgcagagcgccctccaccggcattcttaagcacaccctcataattccaagatattctgctcctggttcacctgcagcagattgacaagcggaatatcaaaatctctgccgcgatccctgagctcctccctcagcaataactgtaagtactctttcatatcctctccgaaatttttagccataggaccaccaggaataagattagggcaagccacagtacagataaaccgaagtcctccccagtgagcattgccaaatgcaagactgctataagcatgctggctagacccggtgatatcttccagataactggacagaaaatcgcccaggcaatttttaagaaaatcaacaaaagaaaaatcctccaggtggacgtttagagcctcgggaacaacgatgaagtaaatgcaagcggtgcgttccagcatggttagttagctgatctgtagaaaaaacaaaaatgaacattaaaccatgctagcctggcgaacaggtgggtaaatcgttctctccagcaccaggcaggccacggggtctccggcgcgaccctcgtaaaaattgtcgctatgattgaaaaccatcacagagagacgttcccggtggccggcgtgaatgattcgacaagatgaatacacccccggaacattggcgtccgcgagtgaaaaaaagcgcccgaggaagcaataaggcactacaatgctcagtctcaagtccagcaaagcgatgccatgcggatgaagcacaaaattctcaggtgcgtacaaaatgtaattactcccctcctgcacaggcagcaaagcccccgatccctccaggtacacatacaaagcctcagcgtccatagcttaccgagcagcagcacacaacaggcgcaagagtcagagaaaggctgagctctaacctgtccacccgctctctgctcaatatatagcccagatctacactgacgtaaaggccaaagtctaaaaatacccgccaaataatcacacacgcccagcacacgcccagaaaccggtgacacactcaaaaaaatacgcgcacttcctcaaacgcccaaaactgccgtcatttccgggttcccacgctacgtcatcaaaacacgactttcaaattccgtcgaccgttaaaaacgtcacccgccccgcccctaacggtcgcccgtctctcagccaatcagcgccccgcatccccaaattcaaacacctcatttgcatattaacgcgcacaaaaagtttgaggtatattattgatgatgg

SEQ ID NO: 2 - DNA, 31588 bp, Artificial Sequence
  Description of Artificial Sequence: Synthetic polynucleotide
ccatcttcaataatatacctcaaactttttgtgcgcgttaatatgcaaatgaggcgtttgaatttggggaggaagggcggtgattggtcgagggatgagcgaccgttaggggcggggcgagtgacgttttgatgacgtggttgcgaggaggagccagtttgcaagttctcgtgggaaaagtgacgtcaaacgaggtgtggtttgaacacggaaatactcaattttcccgcgctctctgacaggaaatgaggtgtttctgggcggatgcaagtgaaaacgggccattttcgcgcgaaaactgaatgaggaagtgaaaatctgagtaatttcgcgtttatggcagggaggagtatttgccgagggccgagtagactttgaccgattacgtgggggtttcgattaccgtgtttttcacctaaatttccgcgtacggtgtcaaagtccggtgtttttacgtaggtgtcagctgatcgccagggtatttaaacctgcgctctccagtcaagaggccactcttgagtgccagcgagaagagttttctcctccgcgccgcgagtcagatctacactttgaaagtagggataacagggtaatgacattgattattgactagttgttaatagtaatcaattacggggtcattagttcatagcccatatatggagttccgcgttacataacttacggtaaatggcccgcctggctgaccgcccaacgacccccgcccattgacgtcaataatgacgtatgttcccatagtaacgccaatagggactttccattgacgtcaatgggtggagtatttacggtaaactgcccacttggcagtacatcaagtgtatcatatgccaagtccgccccctattgacgtcaatgacggtaaatggcccgcctggcattatgcccagtacatgaccttacgggactttcctacttggcagtacatctacgtattagtcatcgctattaccatggtgatgcggttttggcagtacaccaatgggcgtggatagcggtttgactcacggggatttccaagtctccaccccattgacgtcaatgggagtttgttttggcaccaaaatcaacgggactttccaaaatgtcgtaataaccccgccccgttgacgcaaatgggcggtaggcgtgtacggtgggaggtctatataagcagagctcgtttagtgaaccgtcagatcgcctggaacgccatccacgctgttttgacctccatagaagacagcgatcgcgccaccatggccgggatgttccaggcactgtccgaaggctgcacaccctatgatattaaccagatgctgaatgtcctgggagaccaccaggtctctggcctggagcagctggagagcatcatcaacttcgagaagctgaccgagtggacaagctccaatgtgatgcctatcctgtccccactgaccaagggcatcctgggcttcgtgtttaccctgacagtgccttctgagcggggcctgtcttgcatcagcgaggcagacgcaaccacaccagagtccgccaatctgggcgaggagatcctgtctcagctgtacctgtggccccgggtgacatatcactccccttcttacgcctatcaccagttcgagcggagagccaagtacaagagacacttcccaggctttggccagtctctgctgttcggctaccccgtgtacgtgttcggcgattgcgtgcagggcgactgggatgccatccggtttagatactgcgcaccacctggatatgcactgctgaggtgtaacgacaccaattattccgccctgctggcagtgggcgccctggagggccctcgcaatcaggattggctgggcgtgccaaggcagctggtgacacgcatgcaggccatccagaacgcaggcctgtgcaccctggtggcaatgctggaggagacaatcttctggctgcaggcctttctgatggccctgaccgacagcggccccaagacaaacatcatcgtggattcccagtacgtgatgggcatctccaagccttctttccaggagtttgtggactgggagaacgtgagcccagagctgaattccaccgatcagccattctggcaggcaggaatcctggcaaggaacctggtgcctatggtggccacagtgcagggccagaatctgaagtaccagggccagagcctggtcatcagcgcctccatcatcgtgtttaacctgctggagctggagggcgactatcgggacgatggcaacgtgtgggtgcacaccccactgagccccagaacactgaacgcctgggtgaaggccgtggaggagaagaagggcatcccagtgcacctggagctggcctccatgaccaatatggagctgatgtctagcatcgtgcaccagcaggtgaggacatacggacccgtgttcatgtgcctgggaggcctgctgaccatggtggcaggagccgtgtggctgacagtgcgggtgctggagctgttcagagccgcccagctggccaacgatgtggtgctgcagatcatggagctgtgcggagcagcctttcgccaggtgtgccacaccacagtgccatggcccaatgcctccctgacccccaagtggaacaatgagacaacacagcctcagatcgccaactgtagcgtgtacgacttcttcgtgtggctgcactactatagcgtgagggataccctgtggccccgcgtgacataccacatgaataagtacgcctatcacatgctggagaggcgcgccaagtataagagaggccctggcccaggcgcaaagtttgtggcagcatggaccctgaaggccgccgccggccccggccccggccagtatatcaaggctaacagtaagttcattggaatcacagagctgggacccggacctggataatgagtttaaactcccatttaaatgtgagggttaatgcttcgagcagacatgataagatacattgatgagtttggacaaaccacaactagaatgcagtgaaaaaaatgctttatttgtgaaatttgtgatgctattgctttatttgtaaccattataagctgcaataaacaagttaacaacaacaattgcattcattttatgtttcaggttcagggggagatgtgggaggttttttaaagcaagtaaaacctctacaaatgtggtaaaataactataacggtcctaaggtagcgagtgagtagtgttctggggcgggggaggacctgcatgagggccagaataactgaaatctgtgcttttctgtgtgttgcagcagcatgagcggaagcggctcctttgagggaggggtattcagcccttatctgacggggcgtctcccctcctgggcgggagtgcgtcagaatgtgatgggatccacggtggacggccggcccgtgcagcccgcgaactcttcaaccctgacctatgcaaccctgagctcttcgtcgttggacgcagctgccgccgcagctgctgcatctgccgccagcgccgtgcgcggaatggccatgggcgccggctactacggcactctggtggccaactcgagttccaccaataatcccgccagcctgaacgaggagaagctgttgctgctgatggcccagctcgaggccttgacccagcgcctgggcgagctgacccagcaggtggctcagctgcaggagcagacgcgggccgcggttgccacggtgaaatccaaataaaaaatgaatcaataaataaacggagacggttgttgattttaacacagagtctgaatctttatttgatttttcgcgcgcggtaggccctggaccaccggtctcgatcattgagcacccggtggatcttttccaggacccggtagaggtgggcttggatgttgaggtacatgggcatgagcccgtcccgggggtggaggtagctccattgcagggcctcgtgctcgggggtggtgttgtaaatcacccagtcatagcaggggcgcagggcatggtgttgcacaatatctttgaggaggagactgatggccacgggcagccctttggtgtaggtgtttacaaatctgttgagctgggagggatgcatgcggggggagatgaggtgcatcttggcctggatcttgagattggcgatgttaccgcccagatcccgcctggggttcatgttgtgcaggaccaccagcacggtgtatccggtgcacttggggaatttatcatgcaacttggaagggaaggcgtgaaagaatttggcgacgcctttgtgcccgcccaggttttccatgcactcatccatgatgatggcgatgggcccgtgggcggcggcctgggcaaagacgtttcgggggtcggacacatcatagttgtggtcctgggtgaggtcatcataggccattttaatgaatttggggcggagggtgccggactgggggacaaaggtaccctcgatcccgggggcgtagttcccctcacagatctgcatctcccaggctttgagctcggagggggggatcatgtccacctgcggggcgataaagaacacggtttccggggcgggggagatgagctgggccgaaagcaagttccggagcagctgggacttgccgcagccggtggggccgtagatgaccccgatgaccggctgcaggtggtagttgagggagagacagctgccgtcctcccggaggaggggggccacctcgttcatcatctcgcgcacgtgcatgttctcgcgcaccagttccgccaggaggcgctctccccccagggataggagctcctggagcgaggcgaagtttttcagcggcttgagtccgtcggccatgggcattttggagagggtttgttgcaagagttccaggcggtcccagagctcggtgatgtgctctacggcatctcgatccagcagacctcctcgtttcgcgggttgggacggctgcgggagtagggcaccagacgatgggcgtccagcgcagccagggtccggtccttccagggtcgcagcgtccgcgtcagggtggtctccgtcacggtgaaggggtgcgcgccgggctgggcgcttgcgagggtgcgcttcaggctcatccggctggtcgaaaaccgctcccgatcggcgccctgcgcgtcggccaggtagcaattgaccatgagttcgtagttgagcgcctcggccgcgtggcctttggcgcggagcttacctttggaagtctgcccgcaggcgggacagaggagggacttgagggcgtagagcttgggggcgaggaagacggactcgggggcgtaggcgtccgcgccgcagtgggcgcagacggtctcgcactccacgagccaggtgaggtcgggctggtcggggtcaaaaaccagtttcccgccgttctttttgatgcgtttcttacctttggtctccatgagctcgtgtccccgctgggtgacaaagaggctgtccgtgtccccgtagaccgactttatgggccggtcctcgagcggtgtgccgcggtcctcctcgtagaggaaccccgcccactccgagacgaaagcccgggtccaggccagcacgaaggaggccacgtgggacgggtagcggtcgttgtccaccagcgggtccaccttttccagggtatgcaaacacatgtccccctcgtccacatccaggaaggtgattggcttgtaagtgtaggccacgtgaccgggggtcccggccgggggggtataaaagggtgcgggtccctgctcgtcctcactgtcttccggatcgctgtccaggagcgccagctgttggggtaggtattccctctcgaaggcgggcatgacctcggcactcaggttgtcagtttctagaaacgaggaggatttgatattgacggtgccggcggagatgcctttcaagagcccctcgtccatctggtcagaaaagacgatctttttgttgtcgagcttggtggcgaaggagccgtagagggcgttggagaggagcttggcgatggagcgcatggtctggtttttttccttgtcggcgcgctccttggcggcgatgttgagctgcacgtactcgcgcgccacgcacttccattcggggaagacggtggtcagctcgtcgggcacgattctgacctgccagccccgattatgcagggtgatgaggtccacactggtggccacctcgccgcgcaggggctcattagtccagcagaggcgtccgcccttgcgcgagcagaaggggggcagggggtccagcatgacctcgtcgggggggtcggcatcgatggtgaagatgccgggcaggaggtcggggtcaaagtagctgatggaagtggccagatcgtccagggcagcttgccattcgcgcacggccagcgcgcgctcgtagggactgaggggcgtgccccagggcatgggatgggtaagcgcggaggcgtacatgccgcagatgtcgtagacgtagaggggctcctcgaggatgccgatgtaggtggggtagcagcgccccccgcggatgctggcgcgcacgtagtcatacagctcgtgcgagggggcgaggagccccgggcccaggttggtgcgactgggcttttcggcgcggtagacgatctggcggaaaatggcatgcgagttggaggagatggtgggcctttggaagatgttgaagtgggcgtggggcagtccgaccgagtcgcggatgaagtgggcgtaggagtcttgcagcttggcgacgagctcggcggtgactaggacgtccagagcgcagtagtcgagggtctcctggatgatgtcatacttgagctgtcccttttgtttccacagctcgcggttgagaaggaactcttcgcggtccttccagtactcttcgagggggaacccgtcctgatctgcacggtaagagcctagcatgtagaactggttgacggccttgtaggcgcagcagcccttctccacggggagggcgtaggcctgggcggccttgcgcagggaggtgtgcgtgagggcgaaagtgtccctgaccatgaccttgaggaactggtgcttgaagtcgatatcgtcgcagcccccctgctcccagagctggaagtccgtgcgcttcttgtaggcggggttgggcaaagcgaaagtaacatcgttgaagaggatcttgcccgcgcggggcataaagttgcgagtgatgcggaaaggttggggcacctcggcccggttgttgatgacctgggcggcgagcacgatctcgtcgaagccgttgatgttgtggcccacgatgtagagttccacgaatcgcggacggcccttgacgtggggcagtttcttgagctcctcgtaggtgagctcgtcggggtcgctgagcccgtgctgctcgagcgcccagtcggcgagatgggggttggcgcggaggaaggaagtccagagatccacggccagggcggtttgcagacggtcccggtactgacggaactgctgcccgacggccattttttcgggggtgacgcagtagaaggtgcgggggtccccgtgccagcgatcccatttgagctggagggcgagatcgagggcgagctcgacgagccggtcgtccccggagagtttcatgaccagcatgaaggggacgagctgcttgccgaaggaccccatccaggtgtaggtttccacatcgtaggtgaggaagagcctttcggtgcgaggatgcgagccgatggggaagaactggatctcctgccaccaattggaggaatggctgttgatgtgatggaagtagaaatgccgacggcgcgccgaacactcgtgcttgtgtttatacaagcggccacagtgctcgcaacgctgcacgggatgcacgtgctgcacgagctgtacctgagttcctttgacgaggaatttcagtgggaagtggagtcgtggcgcctgcatctcgtgctgtactacgtcgtggtggtcggcctggccctcttctgcctcgatggtggtcatgctgacgagcccgcgcgggaggcaggtccagacctcggcgcgagcgggtcggagagcgaggacgagggcgcgcaggccggagctgtccagggtcctgagacgctgcggagtcaggtcagtgggcagcggcggcgcgcggttgacttgcaggagtttttccagggcgcgcgggaggtccagatggtacttgatctccaccgcgccattggtggcgacgtcgatggcttgcagggtcccgtgcccctggggtgtgaccaccgtcccccgtttcttcttgggcggctggggcgacgggggcggtgcctcttccatggttagaagcggcggcgaggacgcgcgccgggcggcaggggcggctcggggcccggaggcaggggcggcaggggcacgtcggcgccgcgcgcgggtaggttctggtactgcgcccggagaagactggcgtgagcgacgacgcgacggttgacgtcctggatctgacgcctctgggtgaaggccacgggacccgtgagtttgaacctgaaagagagttcgacagaatcaatctcggtatcgttgacggcggcctgccgcaggatctcttgcacgtcgcccgagttgtcctggtaggcgatctcggtcatgaactgctcgatctcctcctcttgaaggtctccgcggccggcgcgctccacggtggccgcgaggtcgttggagatgcggcccatgagctgcgagaaggcgttcatgcccgcctcgttccagacgcggctgtagaccacgacgccctcgggatcgcgggcgcgcatgaccacctgggcgaggttgagctccacgtggcgcgtgaagaccgcgtagttgcagaggcgctggtagaggtagttgagcgtggtggcgatgtgctcggtgacgaagaaatacatgatccagcggcggagcggcatctcgctgacgtcgcccagcgcctccaaacgttccatggcctcgtaaaagtccacggcgaagttgaaaaactgggagttgcgcgccgagacggtcaactcctcctccagaagacggatgagctcggcgatggtggcgcgcacctcgcgctcgaaggcccccgggagttcctccacttcctcttcttcctcctccactaacatctcttctacttcctcctcaggcggcagtggtggcgggggagggggcctgcgtcgccggcggcgcacgggcagacggtcgatgaagcgctcgatggtctcgccgcgccggcgtcgcatggtctcggtgacggcgcgcccgtcctcgcggggccgcagcgtgaagacgccgccgcgcatctccaggtggccgggggggtccccgttgggcagggagagggcgctgacgatgcatcttatcaattgccccgtagggactccgcgcaaggacctgagcgtctcgagatccacgggatctgaaaaccgctgaacgaaggcttcgagccagtcgcagtcgcaaggtaggctgagcacggtttcttctggcgggtcatgttggttgggagcggggcgggcgatgctgctggtgatgaagttgaaataggcggttctgagacggcggatggtggcgaggagcaccaggtctttgggcccggcttgctggatgcgcagacggtcggccatgccccaggcgtggtcctgacacctggccaggtccttgtagtagtcctgcatgagccgctccacgggcacctcctcctcgcccgcgcggccgtgcatgcgcgtgagcccgaagccgcgctggggctggacgagcgccaggtcggcgacgacgcgctcggcgaggatggcttgctggatctgggtgagggtggtctggaagtcatcaaagtcgacgaagcggtggtaggctccggtgttgatggtgtaggagcagttggccatgacggaccagttgacggtctggtggcccggacgcacgagctcgtggtacttgaggcgcgagtaggcgcgcgtgtcgaagatgtagtcgttgcaggtgcgcaccaggtactggtagccgatgaggaagtgcggcggcggctggcggtagagcggccatcgctcggtggcgggggcgccgggcgcgaggtcctcgagcatggtgcggtggtagccgtagatgtacctggacatccaggtgatgccggcggcggtggtggaggcgcgcgggaactcgcggacgcggttccagatgttgcgcagcggcaggaagtagttcatggtgggcacggtctggcccgtgaggcgcgcgcagtcgtggatgctctatacgggcaaaaacgaaagcggtcagcggctcgactccgtggcctggaggctaagcgaacgggttgggctgcgcgtgtaccccggttcgaatctcgaatcaggctggagccgcagctaacgtggtattggcactcccgtctcgacccaagcctgcaccaaccctccaggatacggaggcgggtcgttttgcaacttttttttggaggccggatgagactagtaagcgcggaaagcggccgaccgcgatggctcgctgccgtagtctggagaagaatcgccagggttgcgttgcggtgtgccccggttcgaggccggccggattccgcggctaacgagggcgtggctgccccgtcgtttccaagaccccatagccagccgacttctccagttacggagcgagcccctcttttgttttgtttgtttttgccagatgcatcccgtactgcggcagatgcgcccccaccaccctccaccgcaacaacagccccctccacagccggcgcttctgcccccgccccagcagcaacttccagccacgaccgccgcggccgccgtgagcggggctggacagagttatgatcaccagctggccttggaagagggcgaggggctggcgcgcctgggggcgtcgtcgccggagcggcacccgcgcgtgcagatgaaaagggacgctcgcgaggcctacgtgcccaagcagaacctgttcagagacaggagcggcgaggagcccgaggagatgcgcgcggcccggttccacgcggggcgggagctgcggcgcggcctggaccgaaagagggtgctgagggacgaggatttcgaggcggacgagctgacggggatcagccccgcgcgcgcgcacgtggccgcggccaacctggtcacggcgtacgagcagaccgtgaaggaggagagcaacttccaaaaatccttcaacaaccacgtgcgcaccctgatcgcgcgcgaggaggtgaccctgggcctgatgcacctgtgggacctgctggaggccatcgtgcagaaccccaccagcaagccgctgacggcgcagctgttcctggtggtgcagcatagtcgggacaacgaagcgttcagggaggcgctgctgaatatcaccgagcccgagggccgctggctcctggacctggtgaacattctgcagagcatcgtggtgcaggagcgcgggctgccgctgtccgagaagctggcggccatcaacttctcggtgctgagtttgggcaagtactacgctaggaagatctacaagaccccgtacgtgcccatagacaaggaggtgaagatcgacgggttttacatgcgcatgaccctgaaagtgctgaccctgagcgacgatctgggggtgtaccgcaacgacaggatgcaccgtgcggtgagcgccagcaggcggcgcgagctgagcgaccaggagctgatgcatagtctgcagcgggccctgaccggggccgggaccgagggggagagctactttgacatgggcgcggacctgcactggcagcccagccgccgggccttggaggcggcggcaggaccctacgtagaagaggtggacgatgaggtggacgaggagggcgagtacctggaagactgatggcgcgaccgtatttttgctagatgcaacaacaacagccacctcctgatcccgcgatgcgggcggcgctgcagagccagccgtccggcattaactcctcggacgattggacccaggccatgcaacgcatcatggcgctgacgacccgcaaccccgaagcctttagacagcagccccaggccaaccggctctcggccatcctggaggccgtggtgccctcgcgctccaaccccacgcacgagaaggtcctggccatcgtgaacgcgctggtggagaacaaggccatccgcggcgacgaggccggcctggtgtacaacgcgctgctggagcgcgtggcccgctacaacagcaccaacgtgcagaccaacctggaccgcatggtgaccgacgtgcgcgaggccgtggcccagcgcgagcggttccaccgcgagtccaacctgggatccatggtggcgctgaacgccttcctcagcacccagcccgccaacgtgccccggggccaggaggactacaccaacttcatcagcgccctgcgcctgatggtgaccgaggtgccccagagcgaggtgtaccagtccgggccggactacttcttccagaccagtcgccagggcttgcagaccgtgaacctgagccaggctttcaagaacttgcagggcctgtggggcgtgcaggccccggtcggggaccgcgcgacggtgtcgagcctgctgacgccgaactcgcgcctgctgctgctgctggtggcccccttcacggacagcggcagcatcaaccgcaactcgtacctgggctacctgattaacctgtaccgcgaggccatcggccaggcgcacgtggacgagcagacctaccaggagatcacccacgtgagccgcgccctgggccaggacgacccgggcaacctggaagccaccctgaactttttgctgaccaaccggtcgcagaagatcccgccccagtacgcgctcagcaccgaggaggagcgcatcctgcgttacgtgcagcagagcgtgggcctgttcctgatgcaggagggggccacccccagcgccgcgctcgacatgaccgcgcgcaacatggagcccagcatgtacgccagcaaccgcccgttcatcaataaactgatggactacttgcatcgggcggccgccatgaactctgactatttcaccaacgccatcctgaatccccactggctcccgccgccggggttctacacgggcgagtacgacatgcccgaccccaatgacgggttcctgtgggacgatgtggacagcagcgtgttctccccccgaccgggtgctaacgagcgccccttgtggaagaaggaaggcagcgaccgacgcccgtcctcggcgctgtccggccgcgagggtgctgccgcggcggtgcccgaggccgccagtcctttcccgagcttgcccttctcgctgaacagtatccgcagcagcgagctgggcaggatcacgcgcccgcgcttgctgggcgaagaggagtacttgaatgactcgctgttgagacccgagcgggagaagaacttccccaataacgggatagaaagcctggtggacaagatgagccgctggaagacgtatgcgcaggagcacagggacgatccccgggcgtcgcagggggccacgagccggggcagcgccgcccgtaaacgccggtggcacgacaggcagcggggacagatgtgggacgatgaggactccgccgacgacagcagcgtgttggacttgggtgggagtggtaacccgttcgctcacctgcgcccccgtatcgggcgcatgatgtaagagaaaccgaaaataaatgatactcaccaaggccatggcgaccagcgtgcgttcgtttcttctctgttgttgttgtatctagtatgatgaggcgtgcgtacccggagggtcctcctccctcgtacgagagcgtgatgcagcaggcgatggcggcggcggcgatgcagcccccgctggaggctccttacgtgcccccgcggtacctggcgcctacggaggggcggaacagcattcgttactcggagctggcacccttgtacgataccacccggttgtacctggtggacaacaagtcggcggacatcgcctcgctgaactaccagaacgaccacagcaacttcctgaccaccgtggtgcagaacaatgacttcacccccacggaggccagcacccagaccatcaactttgacgagcgctcgcggtggggcggccagctgaaaaccatcatgcacaccaacatgcccaacgtgaacgagttcatgtacagcaacaagttcaaggcgcgggtgatggtctcccgcaagacccccaatggggtgacagtgacagaggattatgatggtagtcaggatgagctgaagtatgaatgggtggaatttgagctgcccgaaggcaacttctcggtgaccatgaccatcgacctgatgaacaacgccatcatcgacaattacttggcggtggggcggcagaacggggtgctggagagcgacatcggcgtgaagttcgacactaggaacttcaggctgggctgggaccccgtgaccgagctggtcatgcccggggtgtacaccaacgaggctttccatcccgatattgtcttgctgcccggctgcggggtggacttcaccgagagccgcctcagcaacctgctgggcattcgcaagaggcagcccttccaggaaggcttccagatcatgtacgaggatctggaggggggcaacatccccgcgctcctggatgtcgacgcctatgagaaaagcaaggaggatgcagcagctgaagcaactgcagccgtagctaccgcctctaccgaggtcaggggcgataattttgcaagcgccgcagcagtggcagcggccgaggcggctgaaaccgaaagtaagatagtcattcagccggtggagaaggatagcaagaacaggagctacaacgtactaccggacaagataaacaccgcctaccgcagctggtacctagcctacaactatggcgaccccgagaagggcgtgcgctcctggacgctgctcaccacctcggacgtcacctgcggcgtggagcaagtctactggtcgctgcccgacatgatgcaagacccggtcaccttccgctccacgcgtcaagttagcaactacccggtggtgggcgccgagctcctgcccgtctactccaagagcttcttcaacgagcaggccgtctactcgcagcagctgcgcgccttcacctcgcttacgcacgtcttcaaccgcttccccgagaaccagatcctcgtccgcccgcccgcgcccaccattaccaccgtcagtgaaaacgttcctgctctcacagatcacgggaccctgccgctgcgcagcagtatccggggagtccagcgcgtgaccgttactgacgccagacgccgcacctgcccctacgtctacaaggccctgggcatagtcgcgccgcgcgtcctctcgagccgcaccttctaaatgtccattctcatctcgcccagtaataacaccggttggggcctgcgcgcgcccagcaagatgtacggaggcgctcgccaacgctccacgcaacaccccgtgcgcgtgcgcgggcacttccgcgctccctggggcgccctcaagggccgcgtgcggtcgcgcaccaccgtcgacgacgtgatcgaccaggtggtggccgacgcgcgcaactacacccccgccgccgcgcccgtctccaccgtggacgccgtcatcgacagcgtggtggccgacgcgcgccggtacgcccgcgccaagagccggcggcggcgcatcgcccggcggcaccggagcacccccgccatgcgcgcggcgcgagccttgctgcgcagggccaggcgcacgggacgcagggccatgctcagggcggccagacgcgcggcttcaggcgccagcgccggcaggacccggagacgcgcggccacggcggcggcagcggccatcgccagcatgtcccgcccgcggcgagggaacgtgtactgggtgcgcgacgccgccaccggtgtgcgcgtgcccgtgcgcacccgcccccctcgcacttgaagatgttcacttcgcgatgttgatgtgtcccagcggcgaggaggatgtccaagcgcaaattcaaggaagagatgctccaggtcatcgcgcctgagatctacggccctgcggtggtgaaggaggaaagaaagccccgcaaaatcaagcgggtcaaaaaggacaaaaaggaagaagaaagtgatgtggacggattggtggagtttgtgcgcgagttcgccccccggcggcgcgtgcagtggcgcgggcggaaggtgcaaccggtgctgagacccggcaccaccgtggtcttcacgcccggcgagcgctccggcaccgcttccaagcgctcctacgacgaggtgtacggggatgatgatattctggagcaggcggccgagcgcctgggcgagtttgcttacggcaagcgcagccgttccgcaccgaaggaagaggcggtgtccatcccgctggaccacggcaaccccacgccgagcctcaagcccgtgaccttgcagcaggtgctgccgaccgcggcgccgcgccgggggttcaagcgcgagggcgaggatctgtaccccaccatgcagctgatggtgcccaagcgccagaagctggaagacgtgctggagaccatgaaggtggacccggacgtgcagcccgaggtcaaggtgcggcccatcaagcaggtggccccgggcctgggcgtgcagaccgtggacatcaagattcccacggagcccatggaaacgcagaccgagcccatgatcaagcccagcaccagcaccatggaggtgcagacggatccctggatgccatcggctcctagtcgaagaccccggcgcaagtacggcgcggccagcctgctgatgcccaactacgcgctgcatccttccatcatccccacgccgggctaccgcggcacgcgcttctaccgcggtcataccagcagccgccgccgcaagaccaccactcgccgccgccgtcgccgcaccgccgctgcaaccacccctgccgccctggtgcggagagtgtaccgccgcggccgcgcacctctgaccctgccgcgcgcgcgctaccacccgagcatcgccatttaaactttcgcctgctttgcagatcaatggccctcacatgccgccttcgcgttcccattacgggctaccgaggaagaaaaccgcgccgtagaaggctggcggggaacgggatgcgtcgccaccaccaccggcggcggcgcgccatcagcaagcggttggggggaggcttcctgcccgcgctgatccccatcatcgccgcggcgatcggggcgatccccggcattgcttccgtggcggtgcaggcctctcagcgccactgagacacacttggaaacatcttgtaataaaccaatggactctgacgctcctggtcctgtgatgtgttttcgtagacagatggaagacatcaatttttcgtccctggctccgcgacacggcacgcggccgttcatgggcacctggagcgacatcggcaccagccaactgaacgggggcgccttcaattggagcagtctctggagcgggcttaagaatttcgggtccacgcttaaaacctatggcagcaaggcgtggaacagcaccacagggcaggcgctgagggataagctgaaagagcagaacttccagcagaaggtggtcgatgggctcgcctcgggcatcaacggggtggtggacctggccaaccaggccgtgcagcggcagatcaacagccgcctggacccggtgccgcccgccggctccgtggagatgccgcaggtggaggaggagctgcctcccctggacaagcggggcgagaagcgaccccgccccgatgcggaggagacgctgctgacgcacacggacgagccgcccccgtacgaggaggcggtgaaactgggtctgcccaccacgcggcccatcgcgcccctggccaccggggtgctgaaacccgaaaagcccgcgaccctggacttgcctcctccccagccttcccgcccctctacagtggctaagcccctgccgccggtggccgtggcccgcgcgcgacccgggggcaccgcccgccctcatgcgaactggcagagcactctgaacagcatcgtgggtctgggagtgcagagtgtgaagcgccgccgctgctattaaacctaccgtagcgcttaacttgcttgtctgtgtgtgtatgtattatgtcgccgccgccgctgtccaccagaaggaggagtgaagaggcgcgtcgccgagttgcaagatggccaccccatcgatgctgccccagtgggcgtacatgcacatcgccggacaggacgcttcggagtacctgagtccgggtctggtgcagtttgcccgcgccacagacacctacttcagtctggggaacaagtttaggaaccccacggtggcgcccacgcacgatgtgaccaccgaccgcagccagcggctgacgctgcgcttcgtgcccgtggaccgcgaggacaacacctactcgtacaaagtgcgctacacgctggccgtgggcgacaaccgcgtgctggacatggccagcacctactttgacatccgcggcgtgctggatcggggccctagcttcaaaccctactccggcaccgcctacaacagtctggcccccaagggagcacccaacacttgtcagtggacatataaagccgatggtgaaactgccacagaaaaaacctatacatatggaaatgcacccgtgcagggcattaacatcacaaaagatggtattcaacttggaactgacaccgatgatcagccaatctacgcagataaaacctatcagcctgaacctcaagtgggtgatgctgaatggcatgacatcactggtactgatgaaaagtatggaggcagagctcttaagcctgataccaaaatgaagccttgttatggttcttttgccaagcctactaataaagaaggaggtcaggcaaatgtgaaaacaggaacaggcactactaaagaatatgacatagacatggctttctttgacaacagaagtgcggctgctgctggcctagctccagaaattgttttgtatactgaaaatgtggatttggaaactccagatacccatattgtatacaaagcaggcacagatgacagcagctcttctattaatttgggtcagcaagccatgcccaacagacctaactacattggtttcagagacaactttatcgggctcatgtactacaacagcactggcaatatgggggtgctggccggtcaggcttctcagctgaatgctgtggttgacttgcaagacagaaacaccgagctgtcctaccagctcttgcttgactctctgggtgacagaacccggtatttcagtatgtggaatcaggcggtggacagctatgatcctgatgtgcgcattattgaaaatcatggtgtggaggatgaacttcccaactattgtttccctctggatgctgttggcagaacagatacttatcagggaattaaggctaatggaactgatcaaaccacatggaccaaagatgacagtgtcaatgatgctaatgagataggcaagggtaatccattcgccatggaaatcaacatccaagccaacctgtggaggaacttcctctacgccaacgtggccctgtacctgcccgactcttacaagtacacgccggccaatgttaccctgcccaccaacaccaacacctacgattacatgaacggccgggtggtggcgccctcgctggtggactcctacatcaacatcggggcgcgctggtcgctggatcccatggacaacgtgaaccccttcaaccaccaccgcaatgcggggctgcgctaccgctccatgctcctgggcaacgggcgctacgtgcccttccacatccaggtgccccagaaatttttcgccatcaagagcctcctgctcctgcccgggtcctacacctacgagtggaacttccgcaaggacgtcaacatgatcctgcagagctccctcggcaacgacctgcgcacggacggggcctccatctccttcaccagcatcaacctctacgccaccttcttccccatggcgcacaacacggcctccacgctcgaggccatgctgcgcaacgacaccaacgaccagtccttcaacgactacctctcggcggccaacatgctctaccccatcccggccaacgccaccaacgtgcccatctccatcccctcgcgcaactgggccgccttccgcggctggtccttcacgcgtctcaagaccaaggagacgccctcgctgggctccgggttcgacccctacttcgtctactcgggctccatcccctacctcgacggcaccttctacctcaaccacaccttcaagaaggtctccatcaccttcgactcctccgtcagctggcccggcaacgaccggctcctgacgcccaacgagttcgaaatcaagcgcaccgtcgacggcgagggctacaacgtggcccagtgcaacatgaccaaggactggttcctggtccagatgctggcccactacaacatcggctaccagggcttctacgtgcccgagggctacaaggaccgcatgtactccttcttccgcaacttccagcccatgagccgccaggtggtggacgaggtcaactacaaggactaccaggccgtcaccctggcctaccagcacaacaactcgggcttcgtcggctacctcgcgcccaccatgcgccagggccagccctaccccgccaactacccctacccgctcatcggcaagagcgccgtcaccagcgtcacccagaaaaagttcctctgcgacagggtcatgtggcgcatccccttctccagcaacttcatgtccatgggcgcgctcaccgacctcggccagaacatgctctatgccaactccgcccacgcgctagacatgaatttcgaagtcgaccccatggatgagtccacccttctctatgttgtcttcgaagtcttcgacgtcgtccgagtgcaccagccccaccgcggcgtcatcgaggccgtctacctgcgcacccccttctcggccggtaacgccaccacctaagctcttgcttcttgcaagccatggccgcgggctccggcgagcaggagctcagggccatcatccgcgacctgggctgcgggccctacttcctgggcaccttcgataagcgcttcccgggattcatggccccgcacaagctggcctgcgccatcgtcaacacggccggccgcgagaccgggggcgagcactggctggccttcgcctggaacccgcgctcgaacacctgctacctcttcgaccccttcgggttctcggacgagcgcctcaagcagatctaccagttcgagtacgagggcctgctgcgccgcagcgccctggccaccgaggaccgctgcgtcaccctggaaaagtccacccagaccgtgcagggtccgcgctcggccgcctgcgggctcttctgctgcatgttcctgcacgccttcgtgcactggcccgaccgccccatggacaagaaccccaccatgaacttgctgacgggggtgcccaacggcatgctccagtcgccccaggtggaacccaccctgcgccgcaaccaggaggcgctctaccgcttcctcaactcccactccgcctactttcgctcccaccgcgcgcgcatcgagaaggccaccgccttcgaccgcatgaatcaagacatgtaaaccgtgtgtgtatgttaaatgtctttaataaacagcactttcatgttacacatgcatctgagatgatttatttagaaatcgaaagggttctgccgggtctcggcatggcccgcgggcagggacacgttgcggaactggtacttggccagccacttgaactcggggatcagcagtttgggcagcggggtgtcggggaaggagtcggtccacagcttccgcgtcagttgcagggcgcccagcaggtcgggcgcggagatcttgaaatcgcagttgggacccgcgttctgcgcgcgggagttgcggtacacggggttgcagcactggaacaccatcagggccgggtgcttcacgctcgccagcaccgtcgcgtcggtgatgctctccacgtcgaggtcctcggcgttggccatcccgaagggggtcatcttgcaggtctgccttcccatggtgggcacgcacccgggcttgtggttgcaatcgcagtgcagggggatcagcatcatctgggcctggtcggcgttcatccccgggtacatggccttcatgaaagcctccaattgcctgaacgcctgctgggccttggctccctcggtgaagaagaccccgcaggacttgctagagaactggttggtggcgcacccggcgtcgtgcacgcagcagcgcgcgtcgttgttggccagctgcaccacgctgcgcccccagcggttctgggtgatcttggcccggtcggggttctccttcagcgcgcgctgcccgttctcgctcgccacatccatctcgatcatgtgctccttctggatcatggtggtcccgtgcaggcaccgcagcttgccctcggcctcggtgcacccgtgcagccacagcgcgcacccggtgcactcccagttcttgtgggcgatctgggaatgcgcgtgcacgaagccctgcaggaagcggcccatcatggtggtcagggtcttgttgctagtgaaggtcagcggaatgccgcggtgctcctcgttgatgtacaggtggcagatgcggcggtacacctcgccctgctcgggcatcagctggaagttggctttcaggtcggtctccacgcggtagcggtccatcagcatagtcatgatttccatacccttctcccaggccgagacgatgggcaggctcatagggttcttcaccatcatcttagcgctagcagccgcggccagggggtcgctctcgtccagggtctcaaagctccgcttgccgtccttctcggtgatccgcaccggggggtagctgaagcccacggccgccagctcctcctcggcctgtctttcgtcctcgctgtcctggctgacgtcctgcaggaccacatgcttggtcttgcggggtttcttcttgggcggcagcggcggcggagatgttggagatggcgagggggagcgcgagttctcgctcaccactactatctcttcctcttcttggtccgaggccacgcggcggtaggtatgtctcttcgggggcagaggcggaggcgacgggctctcgccgccgcgacttggcggatggctggcagagccccttccgcgttcgggggtgcgctcccggcggcgctctgactgacttcctccgcggccggccattgtgttctcctagggaggaacaacaagcatggagactcagccatcgccaacctcgccatctgcccccaccgccgacgagaagcagcagcagcagaatgaaagcttaaccgccccgccgcccagccccgccacctccgacgcggccgtcccagacatgcaagagatggaggaatccatcgagattgacctgggctatgtgacgcccgcggagcacgaggaggagctggcagtgcgcttttcacaagaagagatacaccaagaacagccagagcaggaagcagagaatgagcagagtcaggctgggctcgagcatgacggcgactacctccacctgagcgggggggaggacgcgctcatcaagcatctggcccggcaggccaccatcgtcaaggatgcgctgctcgaccgcaccgaggtgcccctcagcgtggaggagctcagccgcgcctacgagttgaacctcttctcgccgcgcgtgccccccaagcgccagcccaatggcacctgcgagcccaacccgcgcctcaacttctacccggtcttcgcggtgcccgaggccctggccacctaccacatctttttcaagaaccaaaagatccccgtctcctgccgcgccaaccgcacccgcgccgacgcccttttcaacctgggtcccggcgcccgcctacctgatatcgcctccttggaagaggttcccaagatcttcgagggtctgggcagcgacgagactcgggccgcgaacgctctgcaaggagaaggaggagagcatgagcaccacagcgccctggtcgagttggaaggcgacaacgcgcggctggcggtgctcaaacgcacggtcgagctgacccatttcgcctacccggctctgaacctgccccccaaagtcatgagcgcggtcatggaccaggtgctcatcaagcgcgcgtcgcccatctccgaggacgagggcatgcaagactccgaggagggcaagcccgtggtcagcgacgagcagctggcccggtggctgggtcctaatgctagtccccagagtttggaagagcggcgcaaactcatgatggccgtggtcctggtgaccgtggagctggagtgcctgcgccgcttcttcgccgacgcggagaccctgcgcaaggtcgaggagaacctgcactacctcttcaggcacgggttcgtgcgccaggcctgcaagatctccaacgtggagctgaccaacctggtctcctacatgggcatcttgcacgagaaccgcctggggcagaacgtgctgcacaccaccctgcgcggggaggcccggcgcgactacatccgcgactgcgtctacctctacctctgccacacctggcagacgggcatgggcgtgtggcagcagtgtctggaggagcagaacctgaaagagctctgcaagctcctgcagaagaacctcaagggtctgtggaccgggttcgacgagcgcaccaccgcctcggacctggccgacctcattttccccgagcgcctcaggctgacgctgcgcaacggcctgcccgactttatgagccaaagcatgttgcaaaactttcgctctttcatcctcgaacgctccggaatcctgcccgccacctgctccgcgctgccctcggacttcgtgccgctgaccttccgcgagtgccccccgccgctgtggagccactgctacctgctgcgcctggccaactacctggcctaccactcggacgtgatcgaggacgtcagcggcgagggcctgctcgagtgccactgccgctgcaacctctgcacgccgcaccgctccctggcctgcaacccccagctgctgagcgagacccagatcatcggcaccttcgagttgcaagggcccagcgaaggcgagggttcagccgccaaggggggtctgaaactcaccccggggctgtggacctcggcctacttgcgcaagttcgtgcccgaggactaccatcccttcgagatcaggttctacgaggaccaatcccatccgcccaaggccgagctgtcggcctgcgtcatcacccagggggcgatcctggcccaattgcaagccatccagaaatcccgccaagaattcttgctgaaaaagggccgcggggtctacctcgacccccagaccggtgaggagctcaaccccggcttcccccaggatgccccgaggaaacaagaagctgaaagtggagctgccgcccgtggaggatttggaggaagactgggagaacagcagtcaggcagaggaggaggagatggaggaagactgggacagcactcaggcagaggaggacagcctgcaagacagtctggaggaagacgaggaggaggcagaggaggaggtggaagaagcagccgccgccagaccgtcgtcctcggcgggggagaaagcaagcagcacggataccatctccgctccgggtcggggtcccgctcgaccacacagtagatgggacgagaccggacgattcccgaaccccaccacccagaccggtaagaaggagcggcagggatacaagtcctggcgggggcacaaaaacgccatcgtctcctgcttgcaggcctgcgggggcaacatctccttcacccggcgctacctgctcttccaccgcggggtgaactttccccgcaacatcttgcattactaccgtcacctccacagcccctactacttccaagaagaggcagcagcagcagaaaaagaccagcagaaaaccagcagctagaaaatccacagcggcggcagcaggtggactgaggatcgcggcgaacgagccggcgcaaacccgggagctgaggaaccggatctttcccaccctctatgccatcttccagcagagtcgggggcaggagcaggaactgaaagtcaagaaccgttctctgcgctcgctcacccgcagttgtctgtatcacaagagcgaagaccaacttcagcgcactctcgaggacgccgaggctctcttcaacaagtactgcgcgctcactcttaaagagtagcccgcgcccgcccagtcgcagaaaaaggcgggaattacgtcacctgtgcccttcgccctagccgcctccacccatcatcatgagcaaagagattcccacgccttacatgtggagctaccagccccagatgggcctggccgccggtgccgcccaggactactccacccgcatgaattggctcagcgccgggcccgcgatgatctcacgggtgaatgacatccgcgcccaccgaaaccagatactcctagaacagtcagcgctcaccgccacgccccgcaatcacctcaatccgcgtaattggcccgccgccctggtgtaccaggaaattccccagcccacgaccgtactacttccgcgagacgcccaggccgaagtccagctgactaactcaggtgtccagctggcgggcggcgccaccctgtgtcgtcaccgccccgctcagggtataaagcggctggtgatccggggcagaggcacacagctcaacgacgaggtggtgagctcttcgctgggtctgcgacctgacggagtcttccaactcgccggatcggggagatcttccttcacgcctcgtcaggccgtcctgactttggagagttcgtcctcgcagccccgctcgggtggcatcggcactctccagttcgtggaggagttcactccctcggtctacttcaaccccttctccggctcccccggccactacccggacgagttcatcccgaacttcgacgccatcagcgagtcggtggacggctacgattgaaactaatcacccccttatccagtgaaataaagatcatattgatgatgattttacagaaataaaaaataatcatttgatttgaaataaagatacaatcatattgatgatttgagtttaacaaaaaaataaagaatcacttacttgaaatctgataccaggtctctgtccatgttttctgccaacaccacttcactcccctcttcccagctctggtactgcaggccccggcgggctgcaaacttcctccacacgctgaaggggatgtcaaattcctcctgtccctcaatcttcattttatcttctatcagatgtccaaaaagcgcgtccgggtggatgatgacttcgaccccgtctacccctacgatgcagacaacgcaccgaccgtgcccttcatcaacccccccttcgtctcttcagatggattccaagagaagcccctgggggtgttgtccctgcgactggccgaccccgtcaccaccaagaacggggaaatcaccctcaagctgggagagggggtggacctcgattcctcgggaaaactcatctccaacacggccaccaaggccgccgcccctctcagtttttccaacaacaccatttcccttaacatggatcaccccttttacactaaagatggaaaattatccttacaagtttctccaccattaaatatactgagaacaagcattctaaacacactagctttaggttttggatcaggtttaggactccgtggctctgccttggcagtacagttagtctctccacttacatttgatactgatggaaacataaagcttaccttagacagaggtttgcatgttacaacaggagatgcaattgaaagcaacataagctgggctaaaggtttaaaatttgaagatggagccatagcaaccaacattggaaatgggttagagtttggaagcagtagtacagaaacaggtgttgatgatgcttacccaatccaagttaaacttggatctggccttagctttgacagtacaggagccataatggctggtaacaaagaagacgataaactcactttgtggacaacacctgatccatcaccaaactgtcaaatactcgcagaaaatgatgcaaaactaacactttgcttgactaaatgtggtagtcaaatactggccactgtgtcagtcttagttgtaggaagtggaaacctaaaccccattactggcaccgtaagcagtgctcaggtgtttctacgttttgatgcaaacggtgttcttttaacagaacattctacactaaaaaaatactgggggtataggcagggagatagcatagatggcactccatataccaatgctgtaggattcatgcccaatttaaaagcttatccaaagtcacaaagttctactactaaaaataatatagtagggcaagtatacatgaatggagatgtttcaaaacctatgcttctcactataaccctcaatggtactgatgacagcaacagtacatattcaatgtcattttcatacacctggactaatggaagctatgttggagcaacatttggggctaactcttataccttctcatacatcgcccaagaatgaacactgtatcccaccctgcatgccaacccttcccaccccactctgtggaacaaactctgaaacacaaaataaaataaagttcaagtgttttattgattcaacagttttacaggattcgagcagttatttttcctccaccctcccaggacatggaatacaccaccctctccccccgcacagccttgaacatctgaatgccattggtgatggacatgcttttggtctccacgttccacacagtttcagagcgagccagtctcgggtcggtcagggagatgaaaccctccgggcactcccgcatctgcacctcacagctcaacagctgaggattgtcctcggtggtcgggatcacggttatctggaagaagcagaagagcggcggtgggaatcatagtccgcgaacgggatcggccggtggtgtcgcatcaggccccgcagcagtcgctgccgccgccgctccgtcaagctgctgctcagggggtccgggtccagggactccctcagcatgatgcccacggccctcagcatcagtcgtctggtgcggcgggcgcagcagcgcatgcggatctcgctcaggtcgctgcagtacgtgcaacacagaaccaccaggttgttcaacagtccatagttcaacacgctccagccgaaactcatcgcgggaaggatgctacccacgtggccgtcgtaccagatcctcaggtaaatcaagtggtgccccctccagaacacgctgcccacgtacatgatctccttgggcatgtggcggttcaccacctcccggtaccacatcaccctctggttgaacatgcagccccggatgatcctgcggaaccacagggccagcaccgccccgcccgccatgcagcgaagagaccccgggtcccggcaatggcaatggaggacccaccgctcgtacccgtggatcatctgggagctgaacaagtctatgttggcacagcacaggcatatgctcatgcatctcttcagcactctcaactcctcgggggtcaaaaccatatcccagggcacggggaactcttgcaggacagcgaaccccgcagaacagggcaatcctcgcacagaacttacattgtgcatggacagggtatcgcaatcaggcagcaccgggtgatcctccaccagagaagcgcgggtctcggtctcctcacagcgtggtaagggggccggccgatacgggtgatggcgggacgcggctgatcgtgttcgcgaccgtgtcatgatgcagttgctttcggacattttcgtacttgctgtagcagaacctggtccgggcgctgcacaccgatcgccggcggcggtctcggcgcttggaacgctcggtgttgaaattgtaaaacagccactctctcagaccgtgcagcagatctagggcctcaggagtgatgaagatcccatcatgcctgatggctctgatcacatcgaccaccgtggaatgggccagacccagccagatgatgcaattttgttgggtttcggtgacggcgggggagggaagaacaggaagaaccatgattaacttttaatccaaacggtctcggagtacttcaaaatgaagatcgcggagatggcacctctcgcccccgctgtgttggtggaaaataacagccaggtcaaaggtgatacggttctcgagatgttccacggtggcttccagcaaagcctccacgcgcacatccagaaacaagacaatagcgaaagcgggagggttctctaattcctcaatcatcatgttacactcctgcaccatccccagataattttcatttttccagccttgaatgattcgaactagttcctgaggtaaatccaagccagccatgataaagagctcgcgcagagcgccctccaccggcattcttaagcacaccctcataattccaagatattctgctcctggttcacctgcagcagattgacaagcggaatatcaaaatctctgccgcgatccctgagctcctccctcagcaataactgtaagtactctttcatatcctctccgaaatttttagccataggaccaccaggaataagattagggcaagccacagtacagataaaccgaagtcctccccagtgagcattgccaaatgcaagactgctataagcatgctggctagacccggtgatatcttccagataactggacagaaaatcgcccaggcaatttttaagaaaatcaacaaaagaaaaatcctccaggtggacgtttagagcctcgggaacaacgatgaagtaaatgcaagcggtgcgttccagcatggttagttagctgatctgtagaaaaaacaaaaatgaacattaaaccatgctagcctggcgaacaggtgggtaaatcgttctctccagcaccaggcaggccacggggtctccggcgcgaccctcgtaaaaattgtcgctatgattgaaaaccatcacagagagacgttcccggtggccggcgtgaatgattcgacaagatgaatacacccccggaacattggcgtccgcgagtgaaaaaaagcgcccgaggaagcaataaggcactacaatgctcagtctcaagtccagcaaagcgatgccatgcggatgaagcacaaaattctcaggtgcgtacaaaatgtaattactcccctcctgcacaggcagcaaagcccccgatccctccaggtacacatacaaagcctcagcgtccatagcttaccgagcagcagcacacaacaggcgcaagagtcagagaaaggctgagctctaacctgtccacccgctctctgctcaatatatagcccagatctacactgacgtaaaggccaaagtctaaaaatacccgccaaataatcacacacgcccagcacacgcccagaaaccggtgacacactcaaaaaaatacgcgcacttcctcaaacgcccaaaactgccgtcatttccgggttcccacgctacgtcatcaaaacacgactttcaaattccgtcgaccgttaaaaacgtcacccgccccgcccctaacggtcgcccgtctctcagccaatcagcgccccgcatccccaaattcaaacacctcatttgcatattaacgcgcacaaaaagtttgagg

SEQ ID NO: 3 - DNA, 11447 bp, Venezuelan equine encephalitis virus
atgggcggcgcatgagagaagcccagaccaattacctacccaaaatggagaaagttcacgttgacatcgaggaagacagcccattcctcagagctttgcagcggagcttcccgcagtttgaggtagaagccaagcaggtcactgataatgaccatgctaatgccagagcgttttcgcatctggcttcaaaactgatcgaaacggaggtggacccatccgacacgatccttgacattggaagtgcgcccgcccgcagaatgtattctaagcacaagtatcattgtatctgtccgatgagatgtgcggaagatccggacagattgtataagtatgcaactaagctgaagaaaaactgtaaggaaataactgataaggaattggacaagaaaatgaaggagctcgccgccgtcatgagcgaccctgacctggaaactgagactatgtgcctccacgacgacgagtcgtgtcgctacgaagggcaagtcgctgtttaccaggatgtatacgcggttgacggaccgacaagtctctatcaccaagccaataagggagttagagtcgcctactggataggctttgacaccaccccttttatgtttaagaacttggctggagcatatccatcatactctaccaactgggccgacgaaaccgtgttaacggctcgtaacataggcctatgcagctctgacgttatggagcggtcacgtagagggatgtccattcttagaaagaagtatttgaaaccatccaacaatgttctattctctgttggctcgaccatctaccacgagaagagggacttactgaggagctggcacctgccgtctgtatttcacttacgtggcaagcaaaattacacatgtcggtgtgagactatagttagttgcgacgggtacgtcgttaaaagaatagctatcagtccaggcctgtatgggaagccttcaggctatgctgctacgatgcaccgcgagggattcttgtgctgcaaagtgacagacacattgaacggggagagggtctcttttcccgtgtgcacgtatgtgccagctacattgtgtgaccaaatgactggcatactggcaacagatgtcagtgcggacgacgcgcaaaaactgctggttgggctcaaccagcgtatagtcgtcaacggtcgcacccagagaaacaccaataccatgaaaaattaccttttgcccgtagtggcccaggcatttgctaggtgggcaaaggaatataaggaagatcaagaagatgaaaggccactaggactacgagatagacagttagtcatggggtgttgttgggcttttagaaggcacaagataacatctatttataagcgcccggatacccaaaccatcatcaaagtgaacagcgatttccactcattcgtgctgcccaggataggcagtaacacattggagatcgggctgagaacaagaatcaggaaaatgttagaggagcacaaggagccgtcacctctcattaccgccgaggacgtacaagaagctaagtgcgcagccgatgaggctaaggaggtgcgtgaagccgaggagttgcgcgcagctctaccacctttggcagctgatgttgaggagcccactctggaagccgatgtcgacttgatgttacaagaggctggggccggctcagtggagacacctcgtggcttgataaaggttaccagctacgctggcgaggacaagatcggctcttacgctgtgctttctccgcaggctgtactcaagagtgaaaaattatcttgcatccaccctctcgctgaacaagtcatagtgataacacactctggccgaaaagggcgttatgccgtggaaccataccatggtaaagtagtggtgccagagggacatgcaatacccgtccaggactttcaagctctgagtgaaagtgccaccattgtgtacaacgaacgtgagttcgtaaacaggtacctgcaccatattgccacacatggaggagcgctgaacactgatgaagaatattacaaaactgtcaagcccagcgagcacgacggcgaatacctgtacgacatcgacaggaaacagtgcgtcaagaaagaactagtcactgggctagggctcacaggcgagctggtggatcctcccttccatgaattcgcctacgagagtctgagaacacgaccagccgctccttaccaagtaccaaccataggggtgtatggcgtgccaggatcaggcaagtctggcatcattaaaagcgcagtcaccaaaaaagatctagtggtgagcgccaagaaagaaaactgtgcagaaattataagggacgtcaagaaaatgaaagggctggacgtcaatgccagaactgtggactcagtgctcttgaatggatgcaaacaccccgtagagaccctgtatattgacgaagcttttgcttgtcatgcaggtactctcagagcgctcatagccattataagacctaaaaaggcagtgctctgcggggatcccaaacagtgcggtttttttaacatgatgtgcctgaaagtgcattttaaccacgagatttgcacacaagtcttccacaaaagcatctctcgccgttgcactaaatctgtgacttcggtcgtctcaaccttgttttacgacaaaaaaatgagaacgacgaatccgaaagagactaagattgtgattgacactaccggcagtaccaaacctaagcaggacgatctcattctcacttgtttcagagggtgggtgaagcagttgcaaatagattacaaaggcaacgaaataatgacggcagctgcctctcaagggctgacccgtaaaggtgtgtatgccgttcggtacaaggtgaatgaaaatcctctgtacgcacccacctcagaacatgtgaacgtcctactgacccgcacggaggaccgcatcgtgtggaaaacactagccggcgacccatggataaaaacactgactgccaagtaccctgggaatttcactgccacgatagaggagtggcaagcagagcatgatgccatcatgaggcacatcttggagagaccggaccctaccgacgtcttccagaataaggcaaacgtgtgttgggccaaggctttagtgccggtgctgaagaccgctggcatagacatgaccactgaacaatggaacactgtggattattttgaaacggacaaagctcactcagcagagatagtattgaaccaactatgcgtgaggttctttggactcgatctggactccggtctattttctgcacccactgttccgttatccattaggaataatcactgggataactccccgtcgcctaacatgtacgggctgaataaagaagtggtccgtcagctctctcgcaggtacccacaactgcctcgggcagttgccactggaagagtctatgacatgaacactggtacactgcgcaattatgatccgcgcataaacctagtacctgtaaacagaagactgcctcatgctttagtcctccaccataatgaacacccacagagtgacttttcttcattcgtcagcaaattgaagggcagaactgtcctggtggtcggggaaaagttgtccgtcccaggcaaaatggttgactggttgtcagaccggcctgaggctaccttcagagctcggctggatttaggcatcccaggtgatgtgcccaaatatgacataatatttgttaatgtgaggaccccatataaataccatcactatcagcagtgtgaagaccatgccattaagcttagcatgttgaccaagaaagcttgtctgcatctgaatcccggcggaacctgtgtcagcataggttatggttacgctgacagggccagcgaaagcatcattggtgctatagcgcggcagttcaagttttcccgggtatgcaaaccgaaatcctcacttgaagagacggaagttctgtttgtattcattgggtacgatcgcaaggcccgtacgcacaatccttacaagctttcatcaaccttgaccaacatttatacaggttccagactccacgaagccggatgtgcaccctcatatcatgtggtgcgaggggatattgccacggccaccgaaggagtgattataaatgctgctaacagcaaaggacaacctggcggaggggtgtgcggagcgctgtataagaaattcccggaaagcttcgatttacagccgatcgaagtaggaaaagcgcgactggtcaaaggtgcagctaaacatatcattcatgccgtaggaccaaacttcaacaaagtttcggaggttgaaggtgacaaacagttggcagaggcttatgagtccatcgctaagattgtcaacgataacaattacaagtcagtagcgattccactgttgtccaccggcatcttttccgggaacaaagatcgactaacccaatcattgaaccatttgctgacagctttagacaccactgatgcagatgtagccatatactgcagggacaagaaatgggaaatgactctcaaggaagcagtggctaggagagaagcagtggaggagatatgcatatccgacgactcttcagtgacagaacctgatgcagagctggtgagggtgcatccgaagagttctttggctggaaggaagggctacagcacaagcgatggcaaaactttctcatatttggaagggaccaagtttcaccaggcggccaaggatatagcagaaattaatgccatgtggcccgttgcaacggaggccaatgagcaggtatgcatgtatatcctcggagaaagcatgagcagtattaggtcgaaatgccccgtcgaagagtcggaagcctccacaccacctagcacgctgccttgcttgtgcatccatgccatgactccagaaagagtacagcgcctaaaagcctcacgtccagaacaaattactgtgtgctcatcctttccattgccgaagtatagaatcactggtgtgcagaagatccaatgctcccagcctatattgttctcaccgaaagtgcctgcgtatattcatccaaggaagtatctcgtggaaacaccaccggtagacgagactccggagccatcggcagagaaccaatccacagaggggacacctgaacaaccaccacttataaccgaggatgagaccaggactagaacgcctgagccgatcatcatcgaagaggaagaagaggatagcataagtttgctgtcagatggcccgacccaccaggtgctgcaagtcgaggcagacattcacgggccgccctctgtatctagctcatcctggtccattcctcatgcatccgactttgatgtggacagtttatccatacttgacaccctggagggagctagcgtgaccagcggggcaacgtcagccgagactaactcttacttcgcaaagagtatggagtttctggcgcgaccggtgcctgcgcctcgaacagtattcaggaaccctccacatcccgctccgcgcacaagaacaccgtcacttgcacccagcagggcctgctcgagaaccagcctagtttccaccccgccaggcgtgaatagggtgatcactagagaggagctcgaggcgcttaccccgtcacgcactcctagcaggtcggtctcgagaaccagcctggtctccaacccgccaggcgtaaatagggtgattacaagagaggagtttgaggcgttcgtagcacaacaacaatgacggtttgatgcgggtgcatacatcttttcctccgacaccggtcaagggcatttacaacaaaaatcagtaaggcaaacggtgctatccgaagtggtgttggagaggaccgaattggagatttcgtatgccccgcgcctcgaccaagaaaaagaagaattactacgcaagaaattacagttaaatcccacacctgctaacagaagcagataccagtccaggaaggtggagaacatgaaagccataacagctagacgtattctgcaaggcctagggcattatttgaaggcagaaggaaaagtggagtgctaccgaaccctgcatcctgttcctttgtattcatctagtgtgaaccgtgccttttcaagccccaaggtcgcagtggaagcctgtaacgccatgttgaaagagaactttccgactgtggcttcttactgtattattccagagtacgatgcctatttggacatggttgacggagcttcatgctgcttagacactgccagtttttgccctgcaaagctgcgcagctttccaaagaaacactcctatttggaacccacaatacgatcggcagtgccttcagcgatccagaacacgctccagaacgtcctggcagctgccacaaaaagaaattgcaatgtcacgcaaatgagagaattgcccgtattggattcggcggcctttaatgtggaatgcttcaagaaatatgcgtgtaataatgaatattgggaaacgtttaaagaaaaccccatcaggcttactgaagaaaacgtggtaaattacattaccaaattaaaaggaccaaaagctgctgctctttttgcgaagacacataatttgaatatgttgcaggacataccaatggacaggtttgtaatggacttaaagagagacgtgaaagtgactccaggaacaaaacatactgaagaacggcccaaggtacaggtgatccaggctgccgatccgctagcaacagcgtatctgtgcggaatccaccgagagctggttaggagattaaatgcggtcctgcttccgaacattcatacactgtttgatatgtcggctgaagactttgacgctattatagccgagcacttccagcctggggattgtgttctggaaactgacatcgcgtcgtttgataaaagtgaggacgacgccatggctctgaccgcgttaatgattctggaagacttaggtgtggacgcagagctgttgacgctgattgaggcggctttcggcgaaatttcatcaatacatttgcccactaaaactaaatttaaattcggagccatgatgaaatctggaatgttcctcacactgtttgtgaacacagtcattaacattgtaatcgcaagcagagtgttgagagaacggctaaccggatcaccatgtgcagcattcattggagatgacaatatcgtgaaaggagtcaaatcggacaaattaatggcagacaggtgcgccacctggttgaatatggaagtcaagattatagatgctgtggtgggcgagaaagcgccttatttctgtggagggtttattttgtgtgactccgtgaccggcacagcgtgccgtgtggcagaccccctaaaaaggctgtttaagcttggcaaacctctggcagcagacgatgaacatgatgatgacaggagaagggcattgcatgaagagtcaacacgctggaaccgagtgggtattctttcagagctgtgcaaggcagtagaatcaaggtatgaaaccgtaggaacttccatcatagttatggccatgactactctagctagcagtgttaaatcattcagctacctgagaggggcccctataactctctacggctaacctgaatggactacgacatagtctagtccgccaagatgttcccgttccagccaatgtatccgatgcagccaatgccctatcgcaacccgttcgcggccccgcgcaggccctggttccccagaaccgacccttttctggcgatgcaggtgcaggaattaacccgctcgatggctaacctgacgttcaagcaacgccgggacgcgccacctgaggggccatccgctaagaaaccgaagaaggaggcctcgcaaaaacagaaagggggaggccaagggaagaagaagaagaaccaagggaagaagaaggctaagacagggccgcctaatccgaaggcacagaatggaaacaagaagaagaccaacaagaaaccaggcaagagacagcgcatggtcatgaaattggaatctgacaagacgttcccaatcatgttggaagggaagataaacggctacgcttgtgtggtcggagggaagttattcaggccgatgcatgtggaaggcaagatcgacaacgacgttctggccgcgcttaagacgaagaaagcatccaaatacgatcttgagtatgcagatgtgccacagaacatgcgggccgatacattcaaatacacccatgagaaaccccaaggctattacagctggcatcatggagcagtccaatatgaaaatgggcgtttcacggtgccgaaaggagttggggccaagggagacagcggacgacccattctggataaccagggacgggtggtcgctattgtgctgggaggtgtgaatgaaggatctaggacagccctttcagtcgtcatgtggaacgagaagggagttaccgtgaagtatactccggagaactgcgagcaatggtcactagtgaccaccatgtgtctgctcgccaatgtgacgttcccatgtgctcaaccaccaatttgctacgacagaaaaccagcagagactttggccatgctcagcgttaacgttgacaacccgggctacgatgagctgctggaagcagctgttaagtgccccggaaggaaaaggagatccaccgaggagctgtttaaggagtataagctaacgcgcccttacatggccagatgcatcagatgtgcagttgggagctgccatagtccaatagcaatcgaggcagtaaagagcgacgggcacgacggttatgttagacttcagacttcctcgcagtatggcctggattcctccggcaacttaaagggcaggaccatgcggtatgacatgcacgggaccattaaagagataccactacatcaagtgtcactccatacatctcgcccgtgtcacattgtggatgggcacggttatttcctgcttgccaggtgcccggcaggggactccatcaccatggaatttaagaaagattccgtcacacactcctgctcggtgccgtatgaagtgaaatttaatcctgtaggcagagaactctatactcatcccccagaacacggagtagagcaagcgtgccaagtctacgcacatgatgcacagaacagaggagcttatgtcgagatgcacctcccgggctcagaagtggacagcagtttggtttccttgagcggcagttcagtcaccgtgacacctcctgttgggactagcgccctggtggaatgcgagtgtggcggcacaaagatctccgagaccatcaacaagacaaaacagttcagccagtgcacaaagaaggagcagtgcagagcatatcggctgcagaacgataagtgggtgtataattctgacaaactgcccaaagcagcgggagccaccttaaaaggaaaactgcatgtcccattcttgctggcagacggcaaatgcaccgtgcctctagcaccagaacctatgataacctttggtttcagatcagtgtcactgaaactgcaccctaagaatcccacatatctaaccacccgccaacttgctgatgagcctcactacacgcacgagctcatatctgaaccagctgttaggaattttaccgtcaccgaaaaagggtgggagtttgtatggggaaaccacccgccgaaaaggttttgggcacaggaaacagcacccggaaatccacatgggctaccgcacgaggtgataactcattattaccacagataccctatgtccaccatcctgggtttgtcaatttgtgccgccattgcaaccgtttccgttgcagcgtctacctggctgttttgcagatctagagttgcgtgcctaactccttaccggctaacacctaacgctaggataccattttgtctggctgtgctttgctgcgcccgcactgcccgggccgagaccacctgggagtccttggatcacctatggaacaataaccaacagatgttctggattcaattgctgatccctctggccgccttgatcgtagtgactcgcctgctcaggtgcgtgtgctgtgtcgtgccttttttagtcatggccggcgccgcaggcgccggcgcctacgagcacgcgaccacgatgccgagccaagcgggaatctcgtataacactatagtcaacagagcaggctacgcaccactccctatcagcataacaccaacaaagatcaagctgatacctacagtgaacttggagtacgtcacctgccactacaaaacaggaatggattcaccagccatcaaatgctgcggatctcaggaatgcactccaacttacaggcctgatgaacagtgcaaagtcttcacaggggtttacccgttcatgtggggtggtgcatattgcttttgcgacactgagaacacccaagtcagcaaggcctacgtaatgaaatctgacgactgccttgcggatcatgctgaagcatataaagcgcacacagcctcagtgcaggcgttcctcaacatcacagtgggagaacactctattgtgactaccgtgtatgtgaatggagaaactcctgtgaatttcaatggggtcaaattaactgcaggtccgctttccacagcttggacaccctttgatcgcaaaatcgtgcagtatgccggggagatctataattatgattttcctgagtatggggcaggacaaccaggagcatttggagatatacaatccagaacagtctcaagctcagatctgtatgccaataccaacctagtgctgcagagacccaaagcaggagcgatccacgtgccatacactcaggcaccttcgggttttgagcaatggaagaaagataaagctccatcattgaaatttaccgcccctttcggatgcgaaatatatacaaaccccattcgcgccgaaaactgtgctgtagggtcaattccattagcctttgacattcccgacgccttgttcaccagggtgtcagaaacaccgacactttcagcggccgaatgcactcttaacgagtgcgtgtattcttccgactttggtgggatcgccacggtcaagtactcggccagcaagtcaggcaagtgcgcagtccatgtgccatcagggactgctaccctaaaagaagcagcagtcgagctaaccgagcaagggtcggcgactatccatttctcgaccgcaaatatccacccggagttcaggctccaaatatgcacatcatatgttacgtgcaaaggtgattgtcaccccccgaaagaccatattgtgacacaccctcagtatcacgcccaaacatttacagccgcggtgtcaaaaaccgcgtggacgtggttaacatccctgctgggaggatcagccgtaattattataattggcttggtgctggctactattgtggccatgtacgtgctgaccaaccagaaacataattgaatacagcagcaattggcaagctgcttacatagaactcgcggcgattggcatgccgccttaaaatttttattttattttttcttttcttttccgaatcggattttgtttttaatatttc

SEQ ID NO: 4 - DNA, 9577 bp, Artificial Sequence
  Description of Artificial Sequence: Synthetic polynucleotide
atgggcggcgcatgagagaagcccagaccaattacctacccaaaatggagaaagttcacgttgacatcgaggaagacagcccattcctcagagctttgcagcggagcttcccgcagtttgaggtagaagccaagcaggtcactgataatgaccatgctaatgccagagcgttttcgcatctggcttcaaaactgatcgaaacggaggtggacccatccgacacgatccttgacattggaagtgcgcccgcccgcagaatgtattctaagcacaagtatcattgtatctgtccgatgagatgtgcggaagatccggacagattgtataagtatgcaactaagctgaagaaaaactgtaaggaaataactgataaggaattggacaagaaaatgaaggagctcgccgccgtcatgagcgaccctgacctggaaactgagactatgtgcctccacgacgacgagtcgtgtcgctacgaagggcaagtcgctgtttaccaggatgtatacgcggttgacggaccgacaagtctctatcaccaagccaataagggagttagagtcgcctactggataggctttgacaccaccccttttatgtttaagaacttggctggagcatatccatcatactctaccaactgggccgacgaaaccgtgttaacggctcgtaacataggcctatgcagctctgacgttatggagcggtcacgtagagggatgtccattcttagaaagaagtatttgaaaccatccaacaatgttctattctctgttggctcgaccatctaccacgagaagagggacttactgaggagctggcacctgccgtctgtatttcacttacgtggcaagcaaaattacacatgtcggtgtgagactatagttagttgcgacgggtacgtcgttaaaagaatagctatcagtccaggcctgtatgggaagccttcaggctatgctgctacgatgcaccgcgagggattcttgtgctgcaaagtgacagacacattgaacggggagagggtctcttttcccgtgtgcacgtatgtgccagctacattgtgtgaccaaatgactggcatactggcaacagatgtcagtgcggacgacgcgcaaaaactgctggttgggctcaaccagcgtatagtcgtcaacggtcgcacccagagaaacaccaataccatgaaaaattaccttttgcccgtagtggcccaggcatttgctaggtgggcaaaggaatataaggaagatcaagaagatgaaaggccactaggactacgagatagacagttagtcatggggtgttgttgggcttttagaaggcacaagataacatctatttataagcgcccggatacccaaaccatcatcaaagtgaacagcgatttccactcattcgtgctgcccaggataggcagtaacacattggagatcgggctgagaacaagaatcaggaaaatgttagaggagcacaaggagccgtcacctctcattaccgccgaggacgtacaagaagctaagtgcgcagccgatgaggctaaggaggtgcgtgaagccgaggagttgcgcgcagctctaccacctttggcagctgatgttgaggagcccactctggaagccgatgtcgacttgatgttacaagaggctggggccggctcagtggagacacctcgtggcttgataaaggttaccagctacgctggcgaggacaagatcggctcttacgctgtgctttctccgcaggctgtactcaagagtgaaaaattatcttgcatccaccctctcgctgaacaagtcatagtgataacacactctggccgaaaagggcgttatgccgtggaaccataccatggtaaagtagtggtgccagagggacatgcaatacccgtccaggactttcaagctctgagtgaaagtgccaccattgtgtacaacgaacgtgagttcgtaaacaggtacctgcaccatattgccacacatggaggagcgctgaacactgatgaagaatattacaaaactgtcaagcccagcgagcacgacggcgaatacctgtacgacatcgacaggaaacagtgcgtcaagaaagaactagtcactgggctagggctcacaggcgagctggtggatcctcccttccatgaattcgcctacgagagtctgagaacacgaccagccgctccttaccaagtaccaaccataggggtgtatggcgtgccaggatcaggcaagtctggcatcattaaaagcgcagtcaccaaaaaagatctagtggtgagcgccaagaaagaaaactgtgcagaaattataagggacgtcaagaaaatgaaagggctggacgtcaatgccagaactgtggactcagtgctcttgaatggatgcaaacaccccgtagagaccctgtatattgacgaagcttttgcttgtcatgcaggtactctcagagcgctcatagccattataagacctaaaaaggcagtgctctgcggggatcccaaacagtgcggtttttttaacatgatgtgcctgaaagtgcattttaaccacgagatttgcacacaagtcttccacaaaagcatctctcgccgttgcactaaatctgtgacttcggtcgtctcaaccttgttttacgacaaaaaaatgagaacgacgaatccgaaagagactaagattgtgattgacactaccggcagtaccaaacctaagcaggacgatctcattctcacttgtttcagagggtgggtgaagcagttgcaaatagattacaaaggcaacgaaataatgacggcagctgcctctcaagggctgacccgtaaaggtgtgtatgccgttcggtacaaggtgaatgaaaatcctctgtacgcacccacctcagaacatgtgaacgtcctactgacccgcacggaggaccgcatcgtgtggaaaacactagccggcgacccatggataaaaacactgactgccaagtaccctgggaatttcactgccacgatagaggagtggcaagcagagcatgatgccatcatgaggcacatcttggagagaccggaccctaccgacgtcttccagaataaggcaaacgtgtgttgggccaaggctttagtgccggtgctgaagaccgctggcatagacatgaccactgaacaatggaacactgtggattattttgaaacggacaaagctcactcagcagagatagtattgaaccaactatgcgtgaggttctttggactcgatctggactccggtctattttctgcacccactgttccgttatccattaggaataatcactgggataactccccgtcgcctaacatgtacgggctgaataaagaagtggtccgtcagctctctcgcaggtacccacaactgcctcgggcagttgccactggaagagtctatgacatgaacactggtacactgcgcaattatgatccgcgcataaacctagtacctgtaaacagaagactgcctcatgctttagtcctccaccataatgaacacccacagagtgacttttcttcattcgtcagcaaattgaagggcagaactgtcctggtggtcggggaaaagttgtccgtcccaggcaaaatggttgactggttgtcagaccggcctgaggctaccttcagagctcggctggatttaggcatcccaggtgatgtgcccaaatatgacataatatttgttaatgtgaggaccccatataaataccatcactatcagcagtgtgaagaccatgccattaagcttagcatgttgaccaagaaagcttgtctgcatctgaatcccggcggaacctgtgtcagcataggttatggttacgctgacagggccagcgaaagcatcattggtgctatagcgcggcagttcaagttttcccgggtatgcaaaccgaaatcctcacttgaagagacggaagttctgtttgtattcattgggtacgatcgcaaggcccgtacgcacaatccttacaagctttcatcaaccttgaccaacatttatacaggttccagactccacgaagccggatgtgcaccctcatatcatgtggtgcgaggggatattgccacggccaccgaaggagtgattataaatgctgctaacagcaaaggacaacctggcggaggggtgtgcggagcgctgtataagaaattcccggaaagcttcgatttacagccgatcgaagtaggaaaagcgcgactggtcaaaggtgcagctaaacatatcattcatgccgtaggaccaaacttcaacaaagtttcggaggttgaaggtgacaaacagttggcagaggcttatgagtccatcgctaagattgtcaacgataacaattacaagtcagtagcgattccactgttgtccaccggcatcttttccgggaacaaagatcgactaacccaatcattgaaccatttgctgacagctttagacaccactgatgcagatgtagccatatactgcagggacaagaaatgggaaatgactctcaaggaagcagtggctaggagagaagcagtggaggagatatgcatatccgacgactcttcagtgacagaacctgatgcagagctggtgagggtgcatccgaagagttctttggctggaaggaagggctacagcacaagcgatggcaaaactttctcatatttggaagggaccaagtttcaccaggcggccaaggatatagcagaaattaatgccatgtggcccgttgcaacggaggccaatgagcaggtatgcatgtatatcctcggagaaagcatgagcagtattaggtcgaaatgccccgtcgaagagtcggaagcctccacaccacctagcacgctgccttgcttgtgcatccatgccatgactccagaaagagtacagcgcctaaaagcctcacgtccagaacaaattactgtgtgctcatcctttccattgccgaagtatagaatcactggtgtgcagaagatccaatgctcccagcctatattgttctcaccgaaagtgcctgcgtatattcatccaaggaagtatctcgtggaaacaccaccggtagacgagactccggagccatcggcagagaaccaatccacagaggggacacctgaacaaccaccacttataaccgaggatgagaccaggactagaacgcctgagccgatcatcatcgaagaggaagaagaggatagcataagtttgctgtcagatggcccgacccaccaggtgctgcaagtcgaggcagacattcacgggccgccctctgtatctagctcatcctggtccattcctcatgcatccgactttgatgtggacagtttatccatacttgacaccctggagggagctagcgtgaccagcggggcaacgtcagccgagactaactcttacttcgcaaagagtatggagtttctggcgcgaccggtgcctgcgcctcgaacagtattcaggaaccctccacatcccgctccgcgcacaagaacaccgtcacttgcacccagcagggcctgctcgagaaccagcctagtttccaccccgccaggcgtgaatagggtgatcactagagaggagctcgaggcgcttaccccgtcacgcactcctagcaggtcggtctcgagaaccagcctggtctccaacccgccaggcgtaaatagggtgattacaagagaggagtttgaggcgttcgtagcacaacaacaatgacggtttgatgcgggtgcatacatcttttcctccgacaccggtcaagggcatttacaacaaaaatcagtaaggcaaacggtgctatccgaagtggtgttggagaggaccgaattggagatttcgtatgccccgcgcctcgaccaagaaaaagaagaattactacgcaagaaattacagttaaatcccacacctgctaacagaagcagataccagtccaggaaggtggagaacatgaaagccataacagctagacgtattctgcaaggcctagggcattatttgaaggcagaaggaaaagtggagtgctaccgaaccctgcatcctgttcctttgtattcatctagtgtgaaccgtgccttttcaagccccaaggtcgcagtggaagcctgtaacgccatgttgaaagagaactttccgactgtggcttcttactgtattattccagagtacgatgcctatttggacatggttgacggagcttcatgctgcttagacactgccagtttttgccctgcaaagctgcgcagctttccaaagaaacactcctatttggaacccacaatacgatcggcagtgccttcagcgatccagaacacgctccagaacgtcctggcagctgccacaaaaagaaattgcaatgtcacgcaaatgagagaattgcccgtattggattcggcggcctttaatgtggaatgcttcaagaaatatgcgtgtaataatgaatattgggaaacgtttaaagaaaaccccatcaggcttactgaagaaaacgtggtaaattacattaccaaattaaaaggaccaaaagctgctgctctttttgcgaagacacataatttgaatatgttgcaggacataccaatggacaggtttgtaatggacttaaagagagacgtgaaagtgactccaggaacaaaacatactgaagaacggcccaaggtacaggtgatccaggctgccgatccgctagcaacagcgtatctgtgcggaatccaccgagagctggttaggagattaaatgcggtcctgcttccgaacattcatacactgtttgatatgtcggctgaagactttgacgctattatagccgagcacttccagcctggggattgtgttctggaaactgacatcgcgtcgtttgataaaagtgaggacgacgccatggctctgaccgcgttaatgattctggaagacttaggtgtggacgcagagctgttgacgctgattgaggcggctttcggcgaaatttcatcaatacatttgcccactaaaactaaatttaaattcggagccatgatgaaatctggaatgttcctcacactgtttgtgaacacagtcattaacattgtaatcgcaagcagagtgttgagagaacggctaaccggatcaccatgtgcagcattcattggagatgacaatatcgtgaaaggagtcaaatcggacaaattaatggcagacaggtgcgccacctggttgaatatggaagtcaagattatagatgctgtggtgggcgagaaagcgccttatttctgtggagggtttattttgtgtgactccgtgaccggcacagcgtgccgtgtggcagaccccctaaaaaggctgtttaagcttggcaaacctctggcagcagacgatgaacatgatgatgacaggagaagggcattgcatgaagagtcaacacgctggaaccgagtgggtattctttcagagctgtgcaaggcagtagaatcaaggtatgaaaccgtaggaacttccatcatagttatggccatgactactctagctagcagtgttaaatcattcagctacctgagaggggcccctataactctctacggctaacctgaatggactacgactctagaatagtctttaattaagccaccatggcaggcatgtttcaggcgctgagcgaaggctgcaccccgtatgatattaaccagatgctgaacgtgctgggcgatcatcaggtctcaggccttgagcagcttgagagtataatcaactttgaaaaactgactgaatggaccagttctaatgttatgcctatcctgtctcctctgacaaagggcatcctgggcttcgtgtttaccctgaccgtgccttctgagagaggacttagctgcattagcgaagcggatgcgaccaccccggaaagcgcgaacctgggcgaagaaattctgagccagctgtatctttggccaagggtgacctaccattcccctagttatgcttaccaccaatttgaaagacgagccaaatataaaagacacttccccggctttggccagagcctgctgtttggctaccctgtgtacgtgttcggcgattgcgtgcagggcgattgggatgcgattcgctttcgctattgcgcgccgccgggctatgcgctgctgcgctgcaacgataccaactatagcgctctgctggctgtgggggccctagaaggacccaggaatcaggactggcttggtgtcccaagacaacttgtaactcggatgcaggctattcagaatgccggcctgtgtaccctggtggccatgctggaagagacaatcttctggctgcaagcgtttctgatggcgctgaccgatagcggcccgaaaaccaacattattgtggatagccagtatgtgatgggcattagcaaaccgagctttcaggaatttgtggattgggaaaacgtgagcccggaactgaacagcaccgatcagccgttttggcaagccggaatcctggccagaaatctggtgcctatggtggccacagtgcagggccagaacctgaagtaccagggtcagtcactagtcatctctgcttctatcattgtcttcaacctgctggaactggaaggtgattatcgagatgatggcaacgtgtgggtgcataccccgctgagcccgcgcaccctgaacgcgtgggtgaaagcggtggaagaaaaaaaaggtattccagttcacctagagctggccagtatgaccaacatggagctcatgagcagtattgtgcatcagcaggtcagaacatacggccccgtgttcatgtgtctcggcggactgcttacaatggtggctggtgctgtgtggctgacagtgcgagtgctcgagctgttccgggccgcgcagctggccaacgacgtggtcctccagatcatggagctttgtggtgcagcgtttcgccaggtgtgccataccaccgtgccgtggccgaacgcgagcctgaccccgaaatggaacaacgaaaccacccagccccagatcgccaactgcagcgtgtatgacttttttgtgtggctccattattattctgttcgagacacactttggccaagggtgacctaccatatgaacaaatatgcgtatcatatgctggaaagacgagccaaatataaaagaggaccaggacctggcgctaaatttgtggccgcctggacactgaaagccgctgctggtcctggacctggccagtacatcaaggccaacagcaagttcatcggcatcaccgaactcggacccggaccaggctgatgattcgaacggccgtatcacgcccaaacatttacagccgcggtgtcaaaaaccgcgtggacgtggttaacatccctgctgggaggatcagccgtaattattataattggcttggtgctggctactattgtggccatgtacgtgctgaccaaccagaaacataattgaatacagcagcaattggcaagctgcttacatagaactcgcggcgattggcatgccgccttaaaatttttattttattttttcttttcttttccgaatcggattttgtttttaatatttcaaaaaaaaaaaaaaaaaaaaaaaaaaaaaaaaaaaaaaaaaaaaaaaaaaaaaaaaaaaaaaaaaaaaaaaaaaaaaaaa

SEQ ID NO: 5 - DNA, 11447 bp, Venezuelan equine encephalitis virus; identical to SEQ ID NO: 3

SEQ ID NO: 6 - DNA, 7894 bp, Artificial Sequence
  Description of Artificial Sequence: Synthetic polynucleotide
atgggcggcgcatgagagaagcccagaccaattacctacccaaaatggagaaagttcacgttgacatcgaggaagacagcccattcctcagagctttgcagcggagcttcccgcagtttgaggtagaagccaagcaggtcactgataatgaccatgctaatgccagagcgttttcgcatctggcttcaaaactgatcgaaacggaggtggacccatccgacacgatccttgacattggaagtgcgcccgcccgcagaatgtattctaagcacaagtatcattgtatctgtccgatgagatgtgcggaagatccggacagattgtataagtatgcaactaagctgaagaaaaactgtaaggaaataactgataaggaattggacaagaaaatgaaggagctcgccgccgtcatgagcgaccctgacctggaaactgagactatgtgcctccacgacgacgagtcgtgtcgctacgaagggcaagtcgctgtttaccaggatgtatacgcggttgacggaccgacaagtctctatcaccaagccaataagggagttagagtcgcctactggataggctttgacaccaccccttttatgtttaagaacttggctggagcatatccatcatactctaccaactgggccgacgaaaccgtgttaacggctcgtaacataggcctatgcagctctgacgttatggagcggtcacgtagagggatgtccattcttagaaagaagtatttgaaaccatccaacaatgttctattctctgttggctcgaccatctaccacgagaagagggacttactgaggagctggcacctgccgtctgtatttcacttacgtggcaagcaaaattacacatgtcggtgtgagactatagttagttgcgacgggtacgtcgttaaaagaatagctatcagtccaggcctgtatgggaagccttcaggctatgctgctacgatgcaccgcgagggattcttgtgctgcaaagtgacagacacattgaacggggagagggtctcttttcccgtgtgcacgtatgtgccagctacattgtgtgaccaaatgactggcatactggcaacagatgtcagtgcggacgacgcgcaaaaactgctggttgggctcaaccagcgtatagtcgtcaacggtcgcacccagagaaacaccaataccatgaaaaattaccttttgcccgtagtggcccaggcatttgctaggtgggcaaaggaatataaggaagatcaagaagatgaaaggccactaggactacgagatagacagttagtcatggggtgttgttgggcttttagaaggcacaagataacatctatttataagcgcccggatacccaaaccatcatcaaagtgaacagcgatttccactcattcgtgctgcccaggataggcagtaacacattggagatcgggctgagaacaagaatcaggaaaatgttagaggagcacaaggagccgtcacctctcattaccgccgaggacgtacaagaagctaagtgcgcagccgatgaggctaaggaggtgcgtgaagccgaggagttgcgcgcagctctaccacctttggcagctgatgttgaggagcccactctggaagccgatgtcgacttgatgttacaagaggctggggccggctcagtggagacacctcgtggcttgataaaggttaccagctacgctggcgaggacaagatcggctcttacgctgtgctttctccgcaggctgtactcaagagtgaaaaattatcttgcatccaccctctcgctgaacaagtcatagtgataacacactctggccgaaaagggcgttatgccgtggaaccataccatggtaaagtagtggtgccagagggacatgcaatacccgtccaggactttcaagctctgagtgaaagtgccaccattgtgtacaacgaacgtgagttcgtaaacaggtacctgcaccatattgccacacatggaggagcgctgaacactgatgaagaatattacaaaactgtcaagcccagcgagcacgacggcgaatacctgtacgacatcgacaggaaacagtgcgtcaagaaagaactagtcactgggctagggctcacaggcgagctggtggatcctcccttccatgaattcgcctacgagagtctgagaacacgaccagccgctccttaccaagtaccaaccataggggtgtatggcgtgccaggatcaggcaagtctggcatcattaaaagcgcagtcaccaaaaaagatctagtggtgagcgccaagaaagaaaactgtgcagaaattataagggacgtcaagaaaatgaaagggctggacgtcaatgccagaactgtggactcagtgctcttgaatggatgcaaacaccccgtagagaccctgtatattgacgaagcttttgcttgtcatgcaggtactctcagagcgctcatagccattataagacctaaaaaggcagtgctctgcggggatcccaaacagtgcggtttttttaacatgatgtgcctgaaagtgcattttaaccacgagatttgcacacaagtcttccacaaaagcatctctcgccgttgcactaaatctgtgacttcggtcgtctcaaccttgttttacgacaaaaaaatgagaacgacgaatccgaaagagactaagattgtgattgacactaccggcagtaccaaacctaagcaggacgatctcattctcacttgtttcagagggtgggtgaagcagttgcaaatagattacaaaggcaacgaaataatgacggcagctgcctctcaagggctgacccgtaaaggtgtgtatgccgttcggtacaaggtgaatgaaaatcctctgtacgcacccacctcagaacatgtgaacgtcctactgacccgcacggaggaccgcatcgtgtggaaaacactagccggcgacccatggataaaaacactgactgccaagtaccctgggaatttcactgccacgatagaggagtggcaagcagagcatgatgccatcatgaggcacatcttggagagaccggaccctaccgacgtcttccagaataaggcaaacgtgtgttgggccaaggctttagtgccggtgctgaagaccgctggcatagacatgaccactgaacaatggaacactgtggattattttgaaacggacaaagctcactcagcagagatagtattgaaccaactatgcgtgaggttctttggactcgatctggactccggtctattttctgcacccactgttccgttatccattaggaataatcactgggataactccccgtcgcctaacatgtacgggctgaataaagaagtggtccgtcagctctctcgcaggtacccacaactgcctcgggcagttgccactggaagagtctatgacatgaacactggtacactgcgcaattatgatccgcgcataaacctagtacctgtaaacagaagactgcctcatgctttagtcctccaccataatgaacacccacagagtgacttttcttcattcgtcagcaaattgaagggcagaactgtcctggtggtcggggaaaagttgtccgtcccaggcaaaatggttgactggttgtcagaccggcctgaggctaccttcagagctcggctggatttaggcatcccaggtgatgtgcccaaatatgacataatatttgttaatgtgaggaccccatataaataccatcactatcagcagtgtgaagaccatgccattaagcttagcatgttgaccaagaaagcttgtctgcatctgaatcccggcggaacctgtgtcagcataggttatggttacgctgacagggccagcgaaagcatcattggtgctatagcgcggcagttcaagttttcccgggtatgcaaaccgaaatcctcacttgaagagacggaagttctgtttgtattcattgggtacgatcgcaaggcccgtacgcacaatccttacaagctttcatcaaccttgaccaacatttatacaggttccagactccacgaagccggatgtgcaccctcatatcatgtggtgcgaggggatattgccacggccaccgaaggagtgattataaatgctgctaacagcaaaggacaacctggcggaggggtgtgcggagcgctgtataagaaattcccggaaagcttcgatttacagccgatcgaagtaggaaaagcgcgactggtcaaaggtgcagctaaacatatcattcatgccgtaggaccaaacttcaacaaagtttcggaggttgaaggtgacaaacagttggcagaggcttatgagtccatcgctaagattgtcaacgataacaattacaagtcagtagcgattccactgttgtccaccggcatcttttccgggaacaaagatcgactaacccaatcattgaaccatttgctgacagctttagacaccactgatgcagatgtagccatatactgcagggacaagaaatgggaaatgactctcaaggaagcagtggctaggagagaagcagtggaggagatatgcatatccgacgactcttcagtgacagaacctgatgcagagctggtgagggtgcatccgaagagttctttggctggaaggaagggctacagcacaagcgatggcaaaactttctcatatttggaagggaccaagtttcaccaggcggccaaggatatagcagaaattaatgccatgtggcccgttgcaacggaggccaatgagcaggtatgcatgtatatcctcggagaaagcatgagcagtattaggtcgaaatgccccgtcgaagagtcggaagcctccacaccacctagcacgctgccttgcttgtgcatccatgccatgactccagaaagagtacagcgcctaaaagcctcacgtccagaacaaattactgtgtgctcatcctttccattgccgaagtatagaatcactggtgtgcagaagatccaatgctcccagcctatattgttctcaccgaaagtgcctgcgtatattcatccaaggaagtatctcgtggaaacaccaccggtagacgagactccggagccatcggcagagaaccaatccacagaggggacacctgaacaaccaccacttataaccgaggatgagaccaggactagaacgcctgagccgatcatcatcgaagaggaagaagaggatagcataagtttgctgtcagatggcccgacccaccaggtgctgcaagtcgaggcagacattcacgggccgccctctgtatctagctcatcctggtccattcctcatgcatccgactttgatgtggacagtttatccatacttgacaccctggagggagctagcgtgaccagcggggcaacgtcagccgagactaactcttacttcgcaaagagtatggagtttctggcgcgaccggtgcctgcgcctcgaacagtattcaggaaccctccacatcccgctccgcgcacaagaacaccgtcacttgcacccagcagggcctgctcgagaaccagcctagtttccaccccgccaggcgtgaatagggtgatcactagagaggagctcgaggcgcttaccccgtcacgcactcctagcaggtcggtctcgagaaccagcctggtctccaacccgccaggcgtaaatagggtgattacaagagaggagtttgaggcgttcgtagcacaacaacaatgacggtttgatgcgggtgcatacatcttttcctccgacaccggtcaagggcatttacaacaaaaatcagtaaggcaaacggtgctatccgaagtggtgttggagaggaccgaattggagatttcgtatgccccgcgcctcgaccaagaaaaagaagaattactacgcaagaaattacagttaaatcccacacctgctaacagaagcagataccagtccaggaaggtggagaacatgaaagccataacagctagacgtattctgcaaggcctagggcattatttgaaggcagaaggaaaagtggagtgctaccgaaccctgcatcctgttcctttgtattcatctagtgtgaaccgtgccttttcaagccccaaggtcgcagtggaagcctgtaacgccatgttgaaagagaactttccgactgtggcttcttactgtattattccagagtacgatgcctatttggacatggttgacggagcttcatgctgcttagacactgccagtttttgccctgcaaagctgcgcagctttccaaagaaacactcctatttggaacccacaatacgatcggcagtgccttcagcgatccagaacacgctccagaacgtcctggcagctgccacaaaaagaaattgcaatgtcacgcaaatgagagaattgcccgtattggattcggcggcctttaatgtggaatgcttcaagaaatatgcgtgtaataatgaatattgggaaacgtttaaagaaaaccccatcaggcttactgaagaaaacgtggtaaattacattaccaaattaaaaggaccaaaagctgctgctctttttgcgaagacacataatttgaatatgttgcaggacataccaatggacaggtttgtaatggacttaaagagagacgtgaaagtgactccaggaacaaaacatactgaagaacggcccaaggtacaggtgatccaggctgccgatccgctagcaacagcgtatctgtgcggaatccaccgagagctggttaggagattaaatgcggtcctgcttccgaacattcatacactgtttgatatgtcggctgaagactttgacgctattatagccgagcacttccagcctggggattgtgttctggaaactgacatcgcgtcgtttgataaaagtgaggacgacgccatggctctgaccgcgttaatgattctggaagacttaggtgtggacgcagagctgttgacgctgattgaggcggctttcggcgaaatttcatcaatacatttgcccactaaaactaaatttaaattcggagccatgatgaaatctggaatgttcctcacactgtttgtgaacacagtcattaacattgtaatcgcaagcagagtgttgagagaacggctaaccggatcaccatgtgcagcattcattggagatgacaatatcgtgaaaggagtcaaatcggacaaattaatggcagacaggtgcgccacctggttgaatatggaagtcaagattatagatgctgtggtgggcgagaaagcgccttatttctgtggagggtttattttgtgtgactccgtgaccggcacagcgtgccgtgtggcagaccccctaaaaaggctgtttaagcttggcaaacctctggcagcagacgatgaacatgatgatgacaggagaagggcattgcatgaagagtcaacacgctggaaccgagtgggtattctttcagagctgtgcaaggcagtagaatcaaggtatgaaaccgtaggaacttccatcatagttatggccatgactactctagctagcagtgttaaatcattcagctacctgagaggggcccctataactctctacggctaacctgaatggactacgactatcacgcccaaacatttacagccgcggtgtcaaaaaccgcgtggacgtggttaacatccctgctgggaggatcagccgtaattattataattggcttggtgctggctactattgtggccatgtacgtgctgaccaaccagaaacataattgaatacagcagcaattggcaagctgcttacatagaactcgcggcgattggcatgccgccttaaaatttttattttattttttcttttcttttccgaatcggattttgtttttaatatttcaaaaaaaaaaaaaaaaaaaaaaaaaaaaaaaaaaaaaaaaaaaaaaaaaaaaaaaaaaaaaaaaaaaaaaaaaaaaaaaa

SEQ ID NO: 7 - DNA, 7893 bp, Artificial Sequence
  Description of Artificial Sequence: Synthetic polynucleotide
ataggcggcgcatgagagaagcccagaccaattacctacccaaaatggagaaagttcacgttgacatcgaggaagacagcccattcctcagagctttgcagcggagcttcccgcagtttgaggtagaagccaagcaggtcactgataatgaccatgctaatgccagagcgttttcgcatctggcttcaaaactgatcgaaacggaggtggacccatccgacacgatccttgacattggaagtgcgcccgcccgcagaatgtattctaagcacaagtatcattgtatctgtccgatgagatgtgcggaagatccggacagattgtataagtatgcaactaagctgaagaaaaactgtaaggaaataactgataaggaattggacaagaaaatgaaggagctcgccgccgtcatgagcgaccctgacctggaaactgagactatgtgcctccacgacgacgagtcgtgtcgctacgaagggcaagtcgctgtttaccaggatgtatacgcggttgacggaccgacaagtctctatcaccaagccaataagggagttagagtcgcctactggataggctttgacaccaccccttttatgtttaagaacttggctggagcatatccatcatactctaccaactgggccgacgaaaccgtgttaacggctcgtaacataggcctatgcagctctgacgttatggagcggtcacgtagagggatgtccattcttagaaagaagtatttgaaaccatccaacaatgttctattctctgttggctcgaccatctaccacgagaagagggacttactgaggagctggcacctgccgtctgtatttcacttacgtggcaagcaaaattacacatgtcggtgtgagactatagttagttgcgacgggtacgtcgttaaaagaatagctatcagtccaggcctgtatgggaagccttcaggctatgctgctacgatgcaccgcgagggattcttgtgctgcaaagtgacagacacattgaacggggagagggtctcttttcccgtgtgcacgtatgtgccagctacattgtgtgaccaaatgactggcatactggcaacagatgtcagtgcggacgacgcgcaaaaactgctggttgggctcaaccagcgtatagtcgtcaacggtcgcacccagagaaacaccaataccatgaaaaattaccttttgcccgtagtggcccaggcatttgctaggtgggcaaaggaatataaggaagatcaagaagatgaaaggccactaggactacgagatagacagttagtcatggggtgttgttgggcttttagaaggcacaagataacatctatttataagcgcccggatacccaaaccatcatcaaagtgaacagcgatttccactcattcgtgctgcccaggataggcagtaacacattggagatcgggctgagaacaagaatcaggaaaatgttagaggagcacaaggagccgtcacctctcattaccgccgaggacgtacaagaagctaagtgcgcagccgatgaggctaaggaggtgcgtgaagccgaggagttgcgcgcagctctaccacctttggcagctgatgttgaggagcccactctggaagccgatgtcgacttgatgttacaagaggctggggccggctcagtggagacacctcgtggcttgataaaggttaccagctacgatggcgaggacaagatcggctcttacgctgtgctttctccgcaggctgtactcaagagtgaaaaattatcttgcatccaccctctcgctgaacaagtcatagtgataacacactctggccgaaaagggcgttatgccgtggaaccataccatggtaaagtagtggtgccagagggacatgcaatacccgtccaggactttcaagctctgagtgaaagtgccaccattgtgtacaacgaacgtgagttcgtaaacaggtacctgcaccatattgccacacatggaggagcgctgaacactgatgaagaatattacaaaactgtcaagcccagcgagcacgacggcgaatacctgtacgacatcgacaggaaacagtgcgtcaagaaagaactagtcactgggctagggctcacaggcgagctggtggatcctcccttccatgaattcgcctacgagagtctgagaacacgaccagccgctccttaccaagtaccaaccataggggtgtatggcgtgccaggatcaggcaagtctggcatcattaaaagcgcagtcaccaaaaaagatctagtggtgagcgccaagaaagaaaactgtgcagaaattataagggacgtcaagaaaatgaaagggctggacgtcaatgccagaactgtggactcagtgctcttgaatggatgcaaacaccccgtagagaccctgtatattgacgaagcttttgcttgtcatgcaggtactctcagagcgctcatagccattataagacctaaaaaggcagtgctctgcggggatcccaaacagtgcggtttttttaacatgatgtgcctgaaagtgcattttaaccacgagatttgcacacaagtcttccacaaaagcatctctcgccgttgcactaaatctgtgacttcggtcgtctcaaccttgttttacgacaaaaaaatgagaacgacgaatccgaaagagactaagattgtgattgacactaccggcagtaccaaacctaagcaggacgatctcattctcacttgtttcagagggtgggtgaagcagttgcaaatagattacaaaggcaacgaaataatgacggcagctgcctctcaagggctgacccgtaaaggtgtgtatgccgttcggtacaaggtgaatgaaaatcctctgtacgcacccacctcagaacatgtgaacgtcctactgacccgcacggaggaccgcatcgtgtggaaaacactagccggcgacccatggataaaaacactgactgccaagtaccctgggaatttcactgccacgatagaggagtggcaagcagagcatgatgccatcatgaggcacatcttggagagaccggaccctaccgacgtcttccagaataaggcaaacgtgtgttgggccaaggctttagtgccggtgctgaagaccgctggcatagacatgaccactgaacaatggaacactgtggattattttgaaacggacaaagctcactcagcagagatagtattgaaccaactatgcgtgaggttctttggactcgatctggactccggtctattttctgcacccactgttccgttatccattaggaataatcactgggataactccccgtcgcctaacatgtacgggctgaataaagaagtggtccgtcagctctctcgcaggtacccacaactgcctcgggcagttgccactggaagagtctatgacatgaacactggtacactgcgcaattatgatccgcgcataaacctagtacctgtaaacagaagactgcctcatgctttagtcctccaccataatgaacacccacagagtgacttttcttcattcgtcagcaaattgaagggcagaactgtcctggtggtcggggaaaagttgtccgtcccaggcaaaatggttgactggttgtcagaccggcctgaggctaccttcagagctcggctggatttaggcatcccaggtgatgtgcccaaatatgacataatatttgttaatgtgaggaccccatataaataccatcactatcagcagtgtgaagaccatgccattaagcttagcatgttgaccaagaaagcttgtctgcatctgaatcccggcggaacctgtgtcagcataggttatggttacgctgacagggccagcgaaagcatcattggtgctatagcgcggcagttcaagttttcccgggtatgcaaaccgaaatcctcacttgaagagacggaagttctgtttgtattcattgggtacgatcgcaaggcccgtacgcacaatccttacaagctttcatcaaccttgaccaacatttatacaggttccagactccacgaagccggatgtgcaccctcatatcatgtggtgcgaggggatattgccacggccaccgaaggagtgattataaatgctgctaacagcaaaggacaacctggcggaggggtgtgcggagcgctgtataagaaattcccggaaagcttcgatttacagccgatcgaagtaggaaaagcgcgactggtcaaaggtgcagctaaacatatcattcatgccgtaggaccaaacttcaacaaagtttcggaggttgaaggtgacaaacagttggcagaggcttatgagtccatcgctaagattgtcaacgataacaattacaagtcagtagcgattccactgttgtccaccggcatcttttccgggaacaaagatcgactaacccaatcattgaaccatttgctgacagctttagacaccactgatgcagatgtagccatatactgcagggacaagaaatgggaaatgactctcaaggaagcagtggctaggagagaagcagtggaggagatatgcatatccgacgactcttcagtgacagaacctgatgcagagctggtgagggtgcatccgaagagttctttggctggaaggaagggctacagcacaagcgatggcaaaactttctcatatttggaagggaccaagtttcaccaggcggccaaggatatagcagaaattaatgccatgtggcccgttgcaacggaggccaatgagcaggtatgcatgtatatcctcggagaaagcatgagcagtattaggtcgaaatgccccgtcgaagagtcggaagcctccacaccacctagcacgctgccttgcttgtgcatccatgccatgactccagaaagagtacagcgcctaaaagcctcacgtccagaacaaattactgtgtgctcatcctttccattgccgaagtatagaatcactggtgtgcagaagatccaatgctcccagcctatattgttctcaccgaaagtgcctgcgtatattcatccaaggaagtatctcgtggaaacaccaccggtagacgagactccggagccatcggcagagaaccaatccacagaggggacacctgaacaaccaccacttataaccgaggatgagaccaggactagaacgcctgagccgatcatcatcgaagaggaagaagaggatagcataagtttgctgtcagatggcccgacccaccaggtgctgcaagtcgaggcagacattcacgggccgccctctgtatctagctcatcctggtccattcctcatgcatccgactttgatgtggacagtttatccatacttgacaccctggagggagctagcgtgaccagcggggcaacgtcagccgagactaactcttacttcgcaaagagtatggagtttctggcgcgaccggtgcctgcgcctcgaacagtattcaggaaccctccacatcccgctccgcgcacaagaacaccgtcacttgcacccagcagggcctgctcgagaaccagcctagtttccaccccgccaggcgtgaatagggtgatcactagagaggagctcgaggcgcttaccccgtcacgcactcctagcaggtcggtctcgagaaccagcctggtctccaacccgccaggcgtaaatagggtgattacaagagaggagtttgaggcgttcgtagcacaacaacaatgacggtttgatgcgggtgcatacatcttttcctccgacaccggtcaagggcatttacaacaaaaatcagtaaggcaaacggtgctatccgaagtggtgttggagaggaccgaattggagatttcgtatgccccgcgcctcgaccaagaaaaagaagaattactacgcaagaaattacagttaaatcccacacctgctaacagaagcagataccagtccaggaaggtggagaacatgaaagccataacagctagacgtattctgcaaggcctagggcattatttgaaggcagaaggaaaagtggagtgctaccgaaccctgcatcctgttcctttgtattcatctagtgtgaaccgtgccttttcaagccccaaggtcgcagtggaagcctgtaacgccatgttgaaagagaactttccgactgtggcttcttactgtattattccagagtacgatgcctatttggacatggttgacggagcttcatgctgcttagacactgccagtttttgccctgcaaagctgcgcagctttccaaagaaacactcctatttggaacccacaatacgatcggcagtgccttcagcgatccagaacacgctccagaacgtcctggcagctgccacaaaaagaaattgcaatgtcacgcaaatgagagaattgcccgtattggattcggcggcctttaatgtggaatgcttcaagaaatatgcgtgtaataatgaatattgggaaacgtttaaagaaaaccccatcaggcttactgaagaaaacgtggtaaattacattaccaaattaaaaggaccaaaagctgctgctctttttgcgaagacacataatttgaatatgttgcaggacataccaatggacaggtttgtaatggacttaaagagagacgtgaaagtgactccaggaacaaaacatactgaagaacggcccaaggtacaggtgatccaggctgccgatccgctagcaacagcgtatctgtgcggaatccaccgagagctggttaggagattaaatgcggtcctgcttccgaacattcatacactgtttgatatgtcggctgaagactttgacgctattatagccgagcacttccagcctggggattgtgttctggaaactgacatcgcgtcgtttgataaaagtgaggacgacgccatggctctgaccgcgttaatgattctggaagacttaggtgtggacgcagagctgttgacgctgattgaggcggctttcggcgaaatttcatcaatacatttgcccactaaaactaaatttaaattcggagccatgatgaaatctggaatgttcctcacactgtttgtgaacacagtcattaacattgtaatcgcaagcagagtgttgagagaacggctaaccggatcaccatgtgcagcattcattggagatgacaatatcgtgaaaggagtcaaatcggacaaattaatggcagacaggtgcgccacctggttgaatatggaagtcaagattatagatgctgtggtgggcgagaaagcgccttatttctgtggagggtttattttgtgtgactccgtgaccggcacagcgtgccgtgtggcagaccccctaaaaaggctgtttaagcttggcaaacctctggcagcagacgatgaacatgatgatgacaggagaagggcattgcatgaagagtcaacacgctggaaccgagtgggtattctttcagagctgtgcaaggcagtagaatcaaggtatgaaaccgtaggaacttccatcatagttatggccatgactactctagctagcagtgttaaatcattcagctacctgagaggggcccctataactctctacggctaacctgaatggactacgactatcacgcccaaacatttacagccgcggtgtcaaaaaccgcgtggacgtggttaacatccctgctgggaggatcagccgtaattattataattggcttggtgctggctactattgtggccatgtacgtgctgaccaaccagaaacataattgaatacagcagcaattggcaagctgcttacatagaactcgcggcgattggcatgccgccttaaaatttttattttatttttcttttcttttccgaatcggattttgtttttaatatttcaaaaaaaaaaaaaaaaaaaaaaaaaaaaaaaaaaaaaaaaaaaaaaaaaaaaaaaaaaaaaaaaaaaaaaaaaaaaaaaa

SEQ ID NO: 8 - DNA, 7927 bp, Artificial Sequence
  Description of Artificial Sequence: Synthetic polynucleotide
taatacgactcactataggatgggcggcgcatgagagaagcccagaccaattacctacccaaaatggagaaagttcacgttgacatcgaggaagacagcccattcctcagagctttgcagcggagcttcccgcagtttgaggtagaagccaagcaggtcactgataatgaccatgctaatgccagagcgttttcgcatctggcttcaaaactgatcgaaacggaggtggacccatccgacacgatccttgacattggaagtgcgcccgcccgcagaatgtattctaagcacaagtatcattgtatctgtccgatgagatgtgcggaagatccggacagattgtataagtatgcaactaagctgaagaaaaactgtaaggaaataactgataaggaattggacaagaaaatgaaggagctcgccgccgtcatgagcgaccctgacctggaaactgagactatgtgcctccacgacgacgagtcgtgtcgctacgaagggcaagtcgctgtttaccaggatgtatacgcggttgacggaccgacaagtctctatcaccaagccaataagggagttagagtcgcctactggataggctttgacaccaccccttttatgtttaagaacttggctggagcatatccatcatactctaccaactgggccgacgaaaccgtgttaacggctcgtaacataggcctatgcagctctgacgttatggagcggtcacgtagagggatgtccattcttagaaagaagtatttgaaaccatccaacaatgttctattctctgttggctcgaccatctaccacgagaagagggacttactgaggagctggcacctgccgtctgtatttcacttacgtggcaagcaaaattacacatgtcggtgtgagactatagttagttgcgacgggtacgtcgttaaaagaatagctatcagtccaggcctgtatgggaagccttcaggctatgctgctacgatgcaccgcgagggattcttgtgctgcaaagtgacagacacattgaacggggagagggtctcttttcccgtgtgcacgtatgtgccagctacattgtgtgaccaaatgactggcatactggcaacagatgtcagtgcggacgacgcgcaaaaactgctggttgggctcaaccagcgtatagtcgtcaacggtcgcacccagagaaacaccaataccatgaaaaattaccttttgcccgtagtggcccaggcatttgctaggtgggcaaaggaatataaggaagatcaagaagatgaaaggccactaggactacgagatagacagttagtcatggggtgttgttgggcttttagaaggcacaagataacatctatttataagcgcccggatacccaaaccatcatcaaagtgaacagcgatttccactcattcgtgctgcccaggataggcagtaacacattggagatcgggctgagaacaagaatcaggaaaatgttagaggagcacaaggagccgtcacctctcattaccgccgaggacgtacaagaagctaagtgcgcagccgatgaggctaaggaggtgcgtgaagccgaggagttgcgcgcagctctaccacctttggcagctgatgttgaggagcccactctggaagccgatgtcgacttgatgttacaagaggctggggccggctcagtggagacacctcgtggcttgataaaggttaccagctacgctggcgaggacaagatcggctcttacgctgtgctttctccgcaggctgtactcaagagtgaaaaattatcttgcatccaccctctcgctgaacaagtcatagtgataacacactctggccgaaaagggcgttatgccgtggaaccataccatggtaaagtagtggtgccagagggacatgcaatacccgtccaggactttcaagctctgagtgaaagtgccaccattgtgtacaacgaacgtgagttcgtaaacaggtacctgcaccatattgccacacatggaggagcgctgaacactgatgaagaatattacaaaactgtcaagcccagcgagcacgacggcgaatacctgtacgacatcgacaggaaacagtgcgtcaagaaagaactagtcactgggctagggctcacaggcgagctggtggatcctcccttccatgaattcgcctacgagagtctgagaacacgaccagccgctccttaccaagtaccaaccataggggtgtatggcgtgccaggatcaggcaagtctggcatcattaaaagcgcagtcaccaaaaaagatctagtggtgagcgccaagaaagaaaactgtgcagaaattataagggacgtcaagaaaatgaaagggctggacgtcaatgccagaactgtggactcagtgctcttgaatggatgcaaacaccccgtagagaccctgtatattgacgaagcttttgcttgtcatgcaggtactctcagagcgctcatagccattataagacctaaaaaggcagtgctctgcggggatcccaaacagtgcggtttttttaacatgatgtgcctgaaagtgcattttaaccacgagatttgcacacaagtcttccacaaaagcatctctcgccgttgcactaaatctgtgacttcggtcgtctcaaccttgttttacgacaaaaaaatgagaacgacgaatccgaaagagactaagattgtgattgacactaccggcagtaccaaacctaagcaggacgatctcattctcacttgtttcagagggtgggtgaagcagttgcaaatagattacaaaggcaacgaaataatgacggcagctgcctctcaagggctgacccgtaaaggtgtgtatgccgttcggtacaaggtgaatgaaaatcctctgtacgcacccacctcagaacatgtgaacgtcctactgacccgcacggaggaccgcatcgtgtggaaaacactagccggcgacccatggataaaaacactgactgccaagtaccctgggaatttcactgccacgatagaggagtggcaagcagagcatgatgccatcatgaggcacatcttggagagaccggaccctaccgacgtcttccagaataaggcaaacgtgtgttgggccaaggctttagtgccggtgctgaagaccgctggcatagacatgaccactgaacaatggaacactgtggattattttgaaacggacaaagctcactcagcagagatagtattgaaccaactatgcgtgaggttctttggactcgatctggactccggtctattttctgcacccactgttccgttatccattaggaataatcactgggataactccccgtcgcctaacatgtacgggctgaataaagaagtggtccgtcagctctctcgcaggtacccacaactgcctcgggcagttgccactggaagagtctatgacatgaacactggtacactgcgcaattatgatccgcgcataaacctagtacctgtaaacagaagactgcctcatgctttagtcctccaccataatgaacacccacagagtgacttttcttcattcgtcagcaaattgaagggcagaactgtcctggtggtcggggaaaagttgtccgtcccaggcaaaatggttgactggttgtcagaccggcctgaggctaccttcagagctcggctggatttaggcatcccaggtgatgtgcccaaatatgacataatatttgttaatgtgaggaccccatataaataccatcactatcagcagtgtgaagaccatgccattaagcttagcatgttgaccaagaaagcttgtctgcatctgaatcccggcggaacctgtgtcagcataggttatggttacgctgacagggccagcgaaagcatcattggtgctatagcgcggcagttcaagttttcccgggtatgcaaaccgaaatcctcacttgaagagacggaagttctgtttgtattcattgggtacgatcgcaaggcccgtacgcacaatccttacaagctttcatcaaccttgaccaacatttatacaggttccagactccacgaagccggatgtgcaccctcatatcatgtggtgcgaggggatattgccacggccaccgaaggagtgattataaatgctgctaacagcaaaggacaacctggcggaggggtgtgcggagcgctgtataagaaattcccggaaagcttcgatttacagccgatcgaagtaggaaaagcgcgactggtcaaaggtgcagctaaacatatcattcatgccgtaggaccaaacttcaacaaagtttcggaggttgaaggtgacaaacagttggcagaggcttatgagtccatcgctaagattgtcaacgataacaattacaagtcagtagcgattccactgttgtccaccggcatcttttccgggaacaaagatcgactaacccaatcattgaaccatttgctgacagctttagacaccactgatgcagatgtagccatatactgcagggacaagaaatgggaaatgactctcaaggaagcagtggctaggagagaagcagtggaggagatatgcatatccgacgactcttcagtgacagaacctgatgcagagctggtgagggtgcatccgaagagttctttggctggaaggaagggctacagcacaagcgatggcaaaactttctcatatttggaagggaccaagtttcaccaggcggccaaggatatagcagaaattaatgccatgtggcccgttgcaacggaggccaatgagcaggtatgcatgtatatcctcggagaaagcatgagcagtattaggtcgaaatgccccgtcgaagagtcggaagcctccacaccacctagcacgctgccttgcttgtgcatccatgccatgactccagaaagagtacagcgcctaaaagcctcacgtccagaacaaattactgtgtgctcatcctttccattgccgaagtatagaatcactggtgtgcagaagatccaatgctcccagcctatattgttctcaccgaaagtgcctgcgtatattcatccaaggaagtatctcgtggaaacaccaccggtagacgagactccggagccatcggcagagaaccaatccacagaggggacacctgaacaaccaccacttataaccgaggatgagaccaggactagaacgcctgagccgatcatcatcgaagaggaagaagaggatagcataagtttgctgtcagatggcccgacccaccaggtgctgcaagtcgaggcagacattcacgggccgccctctgtatctagctcatcctggtccattcctcatgcatccgactttgatgtggacagtttatccatacttgacaccctggagggagctagcgtgaccagcggggcaacgtcagccgagactaactcttacttcgcaaagagtatggagtttctggcgcgaccggtgcctgcgcctcgaacagtattcaggaaccctccacatcccgctccgcgcacaagaacaccgtcacttgcacccagcagggcctgctcgagaaccagcctagtttccaccccgccaggcgtgaatagggtgatcactagagaggagctcgaggcgcttaccccgtcacgcactcctagcaggtcggtctcgagaaccagcctggtctccaacccgccaggcgtaaatagggtgattacaagagaggagtttgaggcgttcgtagcacaacaacaatgacggtttgatgcgggtgcatacatcttttcctccgacaccggtcaagggcatttacaacaaaaatcagtaaggcaaacggtgctatccgaagtggtgttggagaggaccgaattggagatttcgtatgccccgcgcctcgaccaagaaaaagaagaattactacgcaagaaattacagttaaatcccacacctgctaacagaagcagataccagtccaggaaggtggagaacatgaaagccataacagctagacgtattctgcaaggcctagggcattatttgaaggcagaaggaaaagtggagtgctaccgaaccctgcatcctgttcctttgtattcatctagtgtgaaccgtgccttttcaagccccaaggtcgcagtggaagcctgtaacgccatgttgaaagagaactttccgactgtggcttcttactgtattattccagagtacgatgcctatttggacatggttgacggagcttcatgctgcttagacactgccagtttttgccctgcaaagctgcgcagctttccaaagaaacactcctatttggaacccacaatacgatcggcagtgccttcagcgatccagaacacgctccagaacgtcctggcagctgccacaaaaagaaattgcaatgtcacgcaaatgagagaattgcccgtattggattcggcggcctttaatgtggaatgcttcaagaaatatgcgtgtaataatgaatattgggaaacgtttaaagaaaaccccatcaggcttactgaagaaaacgtggtaaattacattaccaaattaaaaggaccaaaagctgctgctctttttgcgaagacacataatttgaatatgttgcaggacataccaatggacaggtttgtaatggacttaaagagagacgtgaaagtgactccaggaacaaaacatactgaagaacggcccaaggtacaggtgatccaggctgccgatccgctagcaacagcgtatctgtgcggaatccaccgagagctggttaggagattaaatgcggtcctgcttccgaacattcatacactgtttgatatgtcggctgaagactttgacgctattatagccgagcacttccagcctggggattgtgttctggaaactgacatcgcgtcgtttgataaaagtgaggacgacgccatggctctgaccgcgttaatgattctggaagacttaggtgtggacgcagagctgttgacgctgattgaggcggctttcggcgaaatttcatcaatacatttgcccactaaaactaaatttaaattcggagccatgatgaaatctggaatgttcctcacactgtttgtgaacacagtcattaacattgtaatcgcaagcagagtgttgagagaacggctaaccggatcaccatgtgcagcattcattggagatgacaatatcgtgaaaggagtcaaatcggacaaattaatggcagacaggtgcgccacctggttgaatatggaagtcaagattatagatgctgtggtgggcgagaaagcgccttatttctgtggagggtttattttgtgtgactccgtgaccggcacagcgtgccgtgtggcagaccccctaaaaaggctgtttaagcttggcaaacctctggcagcagacgatgaacatgatgatgacaggagaagggcattgcatgaagagtcaacacgctggaaccgagtgggtattctttcagagctgtgcaaggcagtagaatcaaggtatgaaaccgtaggaacttccatcatagttatggccatgactactctagctagcagtgttaaatcattcagctacctgagaggggcccctataactctctacggctaacctgaatggactacgactatcacgcccaaacatttacagccgcggtgtcaaaaaccgcgtggacgtggttaacatccctgctgggaggatcagccgtaattattataattggcttggtgctggctactattgtggccatgtacgtgctgaccaaccagaaacataattgaatacagcagcaattggcaagctgcttacatagaactcgcggcgattggcatgccgccttaaaatttttattttattttttcttttcttttccgaatcggattttgtttttaatatttcaaaaaaaaaaaaaaaaaaaaaaaaaaaaaaaaaaaaaaaaaaaaaaaaaaaaaaaaaaaaaaaaaaaaaaaaaaaaaaaatacgtagtttaaac

SEQ ID NO: 9 - DNA, 7926 bp, Artificial Sequence
  Description of Artificial Sequence: Synthetic polynucleotide
taatacgactcactataggataggcggcgcatgagagaagcccagaccaattacctacccaaaatggagaaagttcacgttgacatcgaggaagacagcccattcctcagagctttgcagcggagcttcccgcagtttgaggtagaagccaagcaggtcactgataatgaccatgctaatgccagagcgttttcgcatctggcttcaaaactgatcgaaacggaggtggacccatccgacacgatccttgacattggaagtgcgcccgcccgcagaatgtattctaagcacaagtatcattgtatctgtccgatgagatgtgcggaagatccggacagattgtataagtatgcaactaagctgaagaaaaactgtaaggaaataactgataaggaattggacaagaaaatgaaggagctcgccgccgtcatgagcgaccctgacctggaaactgagactatgtgcctccacgacgacgagtcgtgtcgctacgaagggcaagtcgctgtttaccaggatgtatacgcggttgacggaccgacaagtctctatcaccaagccaataagggagttagagtcgcctactggataggctttgacaccaccccttttatgtttaagaacttggctggagcatatccatcatactctaccaactgggccgacgaaaccgtgttaacggctcgtaacataggcctatgcagctctgacgttatggagcggtcacgtagagggatgtccattcttagaaagaagtatttgaaaccatccaacaatgttctattctctgttggctcgaccatctaccacgagaagagggacttactgaggagctggcacctgccgtctgtatttcacttacgtggcaagcaaaattacacatgtcggtgtgagactatagttagttgcgacgggtacgtcgttaaaagaatagctatcagtccaggcctgtatgggaagccttcaggctatgctgctacgatgcaccgcgagggattcttgtgctgcaaagtgacagacacattgaacggggagagggtctcttttcccgtgtgcacgtatgtgccagctacattgtgtgaccaaatgactggcatactggcaacagatgtcagtgcggacgacgcgcaaaaactgctggttgggctcaaccagcgtatagtcgtcaacggtcgcacccagagaaacaccaataccatgaaaaattaccttttgcccgtagtggcccaggcatttgctaggtgggcaaaggaatataaggaagatcaagaagatgaaaggccactaggactacgagatagacagttagtcatggggtgttgttgggcttttagaaggcacaagataacatctatttataagcgcccggatacccaaaccatcatcaaagtgaacagcgatttccactcattcgtgctgcccaggataggcagtaacacattggagatcgggctgagaacaagaatcaggaaaatgttagaggagcacaaggagccgtcacctctcattaccgccgaggacgtacaagaagctaagtgcgcagccgatgaggctaaggaggtgcgtgaagccgaggagttgcgcgcagctctaccacctttggcagctgatgttgaggagcccactctggaagccgatgtcgacttgatgttacaagaggctggggccggctcagtggagacacctcgtggcttgataaaggttaccagctacgatggcgaggacaagatcggctcttacgctgtgctttctccgcaggctgtactcaagagtgaaaaattatcttgcatccaccctctcgctgaacaagtcatagtgataacacactctggccgaaaagggcgttatgccgtggaaccataccatggtaaagtagtggtgccagagggacatgcaatacccgtccaggactttcaagctctgagtgaaagtgccaccattgtgtacaacgaacgtgagttcgtaaacaggtacctgcaccatattgccacacatggaggagcgctgaacactgatgaagaatattacaaaactgtcaagcccagcgagcacgacggcgaatacctgtacgacatcgacaggaaacagtgcgtcaagaaagaactagtcactgggctagggctcacaggcgagctggtggatcctcccttccatgaattcgcctacgagagtctgagaacacgaccagccgctccttaccaagtaccaaccataggggtgtatggcgtgccaggatcaggcaagtctggcatcattaaaagcgcagtcaccaaaaaagatctagtggtgagcgccaagaaagaaaactgtgcagaaattataagggacgtcaagaaaatgaaagggctggacgtcaatgccagaactgtggactcagtgctcttgaatggatgcaaacaccccgtagagaccctgtatattgacgaagcttttgcttgtcatgcaggtactctcagagcgctcatagccattataagacctaaaaaggcagtgctctgcggggatcccaaacagtgcggtttttttaacatgatgtgcctgaaagtgcattttaaccacgagatttgcacacaagtcttccacaaaagcatctctcgccgttgcactaaatctgtgacttcggtcgtctcaaccttgttttacgacaaaaaaatgagaacgacgaatccgaaagagactaagattgtgattgacactaccggcagtaccaaacctaagcaggacgatctcattctcacttgtttcagagggtgggtgaagcagttgcaaatagattacaaaggcaacgaaataatgacggcagctgcctctcaagggctgacccgtaaaggtgtgtatgccgttcggtacaaggtgaatgaaaatcctctgtacgcacccacctcagaacatgtgaacgtcctactgacccgcacggaggaccgcatcgtgtggaaaacactagccggcgacccatggataaaaacactgactgccaagtaccctgggaatttcactgccacgatagaggagtggcaagcagagcatgatgccatcatgaggcacatcttggagagaccggaccctaccgacgtcttccagaataaggcaaacgtgtgttgggccaaggctttagtgccggtgctgaagaccgctggcatagacatgaccactgaacaatggaacactgtggattattttgaaacggacaaagctcactcagcagagatagtattgaaccaactatgcgtgaggttctttggactcgatctggactccggtctattttctgcacccactgttccgttatccattaggaataatcactgggataactccccgtcgcctaacatgtacgggctgaataaagaagtggtccgtcagctctctcgcaggtacccacaactgcctcgggcagttgccactggaagagtctatgacatgaacactggtacactgcgcaattatgatccgcgcataaacctagtacctgtaaacagaagactgcctcatgctttagtcctccaccataatgaacacccacagagtgacttttcttcattcgtcagcaaattgaagggcagaactgtcctggtggtcggggaaaagttgtccgtcccaggcaaaatggttgactggttgtcagaccggcctgaggctaccttcagagctcggctggatttaggcatcccaggtgatgtgcccaaatatgacataatatttgttaatgtgaggaccccatataaataccatcactatcagcagtgtgaagaccatgccattaagcttagcatgttgaccaagaaagcttgtctgcatctgaatcccggcggaacctgtgtcagcataggttatggttacgctgacagggccagcgaaagcatcattggtgctatagcgcggcagttcaagttttcccgggtatgcaaaccgaaatcctcacttgaagagacggaagttctgtttgtattcattgggtacgatcgcaaggcccgtacgcacaatccttacaagctttcatcaaccttgaccaacatttatacaggttccagactccacgaagccggatgtgcaccctcatatcatgtggtgcgaggggatattgccacggccaccgaaggagtgattataaatgctgctaacagcaaaggacaacctggcggaggggtgtgcggagcgctgtataagaaattcccggaaagcttcgatttacagccgatcgaagtaggaaaagcgcgactggtcaaaggtgcagctaaacatatcattcatgccgtaggaccaaacttcaacaaagtttcggaggttgaaggtgacaaacagttggcagaggcttatgagtccatcgctaagattgtcaacgataacaattacaagtcagtagcgattccactgttgtccaccggcatcttttccgggaacaaagatcgactaacccaatcattgaaccatttgctgacagctttagacaccactgatgcagatgtagccatatactgcagggacaagaaatgggaaatgactctcaaggaagcagtggctaggagagaagcagtggaggagatatgcatatccgacgactcttcagtgacagaacctgatgcagagctggtgagggtgcatccgaagagttctttggctggaaggaagggctacagcacaagcgatggcaaaactttctcatatttggaagggaccaagtttcaccaggcggccaaggatatagcagaaattaatgccatgtggcccgttgcaacggaggccaatgagcaggtatgcatgtatatcctcggagaaagcatgagcagtattaggtcgaaatgccccgtcgaagagtcggaagcctccacaccacctagcacgctgccttgcttgtgcatccatgccatgactccagaaagagtacagcgcctaaaagcctcacgtccagaacaaattactgtgtgctcatcctttccattgccgaagtatagaatcactggtgtgcagaagatccaatgctcccagcctatattgttctcaccgaaagtgcctgcgtatattcatccaaggaagtatctcgtggaaacaccaccggtagacgagactccggagccatcggcagagaaccaatccacagaggggacacctgaacaaccaccacttataaccgaggatgagaccaggactagaacgcctgagccgatcatcatcgaagaggaagaagaggatagcataagtttgctgtcagatggcccgacccaccaggtgctgcaagtcgaggcagacattcacgggccgccctctgtatctagctcatcctggtccattcctcatgcatccgactttgatgtggacagtttatccatacttgacaccctggagggagctagcgtgaccagcggggcaacgtcagccgagactaactcttacttcgcaaagagtatggagtttctggcgcgaccggtgcctgcgcctcgaacagtattcaggaaccctccacatcccgctccgcgcacaagaacaccgtcacttgcacccagcagggcctgctcgagaaccagcctagtttccaccccgccaggcgtgaatagggtgatcactagagaggagctcgaggcgcttaccccgtcacgcactcctagcaggtcggtctcgagaaccagcctggtctccaacccgccaggcgtaaatagggtgattacaagagaggagtttgaggcgttcgtagcacaacaacaatgacggtttgatgcgggtgcatacatcttttcctccgacaccggtcaagggcatttacaacaaaaatcagtaaggcaaacggtgctatccgaagtggtgttggagaggaccgaattggagatttcgtatgccccgcgcctcgaccaagaaaaagaagaattactacgcaagaaattacagttaaatcccacacctgctaacagaagcagataccagtccaggaaggtggagaacatgaaagccataacagctagacgtattctgcaaggcctagggcattatttgaaggcagaaggaaaagtggagtgctaccgaaccctgcatcctgttcctttgtattcatctagtgtgaaccgtgccttttcaagccccaaggtcgcagtggaagcctgtaacgccatgttgaaagagaactttccgactgtggcttcttactgtattattccagagtacgatgcctatttggacatggttgacggagcttcatgctgcttagacactgccagtttttgccctgcaaagctgcgcagctttccaaagaaacactcctatttggaacccacaatacgatcggcagtgccttcagcgatccagaacacgctccagaacgtcctggcagctgccacaaaaagaaattgcaatgtcacgcaaatgagagaattgcccgtattggattcggcggcctttaatgtggaatgcttcaagaaatatgcgtgtaataatgaatattgggaaacgtttaaagaaaaccccatcaggcttactgaagaaaacgtggtaaattacattaccaaattaaaaggaccaaaagctgctgctctttttgcgaagacacataatttgaatatgttgcaggacataccaatggacaggtttgtaatggacttaaagagagacgtgaaagtgactccaggaacaaaacatactgaagaacggcccaaggtacaggtgatccaggctgccgatccgctagcaacagcgtatctgtgcggaatccaccgagagctggttaggagattaaatgcggtcctgcttccgaacattcatacactgtttgatatgtcggctgaagactttgacgctattatagccgagcacttccagcctggggattgtgttctggaaactgacatcgcgtcgtttgataaaagtgaggacgacgccatggctctgaccgcgttaatgattctggaagacttaggtgtggacgcagagctgttgacgctgattgaggcggctttcggcgaaatttcatcaatacatttgcccactaaaactaaatttaaattcggagccatgatgaaatctggaatgttcctcacactgtttgtgaacacagtcattaacattgtaatcgcaagcagagtgttgagagaacggctaaccggatcaccatgtgcagcattcattggagatgacaatatcgtgaaaggagtcaaatcggacaaattaatggcagacaggtgcgccacctggttgaatatggaagtcaagattatagatgctgtggtgggcgagaaagcgccttatttctgtggagggtttattttgtgtgactccgtgaccggcacagcgtgccgtgtggcagaccccctaaaaaggctgtttaagcttggcaaacctctggcagcagacgatgaacatgatgatgacaggagaagggcattgcatgaagagtcaacacgctggaaccgagtgggtattctttcagagctgtgcaaggcagtagaatcaaggtatgaaaccgtaggaacttccatcatagttatggccatgactactctagctagcagtgttaaatcattcagctacctgagaggggcccctataactctctacggctaacctgaatggactacgactatcacgcccaaacatttacagccgcggtgtcaaaaaccgcgtggacgtggttaacatccctgctgggaggatcagccgtaattattataattggcttggtgctggctactattgtggccatgtacgtgctgaccaaccagaaacataattgaatacagcagcaattggcaagctgcttacatagaactcgcggcgattggcatgccgccttaaaatttttattttatttttcttttcttttccgaatcggattttgtttttaatatttcaaaaaaaaaaaaaaaaaaaaaaaaaaaaaaaaaaaaaaaaaaaaaaaaaaaaaaaaaaaaaaaaaaaaaaaaaaaaaaaatacgtagtttaaac

SEQ ID NO: 10 - DNA, 36519 bp, Artificial Sequence
  Description of Artificial Sequence: Synthetic polynucleotide
ccatcttcaataatatacctcaaactttttgtgcgcgttaatatgcaaatgaggcgtttgaatttggggaggaagggcggtgattggtcgagggatgagcgaccgttaggggcggggcgagtgacgttttgatgacgtggttgcgaggaggagccagtttgcaagttctcgtgggaaaagtgacgtcaaacgaggtgtggtttgaacacggaaatactcaattttcccgcgctctctgacaggaaatgaggtgtttctgggcggatgcaagtgaaaacgggccattttcgcgcgaaaactgaatgaggaagtgaaaatctgagtaatttcgcgtttatggcagggaggagtatttgccgagggccgagtagactttgaccgattacgtgggggtttcgattaccgtgtttttcacctaaatttccgcgtacggtgtcaaagtccggtgtttttacgtaggtgtcagctgatcgccagggtatttaaacctgcgctctccagtcaagaggccactcttgagtgccagcgagaagagttttctcctccgcgccgcgagtcagatctacactttgaaagatgaggcacctgagagacctgcccgatgagaaaatcatcatcgcttccgggaacgagattctggaactggtggtaaatgccatgatgggcgacgaccctccggagccccccaccccatttgagacaccttcgctgcacgatttgtatgatctggaggtggatgtgcccgaggacgatcccaatgaggaggcggtaaatgatttttttagcgatgccgcgctgctagctgccgaggaggcttcgagctctagctcagacagcgactcttcactgcatacccctagacccggcagaggtgagaaaaagatccccgagcttaaaggggaagagatggacttgcgctgctatgaggaatgcttgcccccgagcgatgatgaggacgagcaggcgatccagaacgcagcgagccagggagtgcaagccgccagcgagagctttgcgctggactgcccgcctctgcccggacacggctgtaagtcttgtgaatttcatcgcatgaatactggagataaagctgtgttgtgtgcactttgctatatgagagcttacaaccattgtgtttacagtaagtgtgattaagttgaactttagagggaggcagagagcagggtgactgggcgatgactggtttatttatgtatatatgttctttatataggtcccgtctctgacgcagatgatgagacccccactacaaagtccacttcgtcacccccagaaattggcacatctccacctgagaatattgttagaccagttcctgttagagccactgggaggagagcagctgtggaatgtttggatgacttgctacagggtggggttgaacctttggacttgtgtacccggaaacgccccaggcactaagtgccacacatgtgtgtttacttgaggtgatgtcagtatttatagggtgtggagtgcaataaaaaatgtgttgactttaagtgcgtggtttatgactcaggggtggggactgtgagtatataagcaggtgcagacctgtgtggttagctcagagcggcatggagatttggacggtcttggaagactttcacaagactagacagctgctagagaacgcctcgaacggagtctcttacctgtggagattctgcttcggtggcgacctagctaggctagtctacagggccaaacaggattatagtgaacaatttgaggttattttgagagagtgttctggtctttttgacgctcttaacttgggccatcagtctcactttaaccagaggatttcgagagcccttgattttactactcctggcagaaccactgcagcagtagccttttttgcttttattcttgacaaatggagtcaagaaacccatttcagcagggattaccagctggatttcttagcagtagctttgtggagaacatggaagtgccagcgcctgaatgcaatctccggctacttgccggtacagccgctagacactctgaggatcctgaatctccaggagagtcccagggcacgccaacgtcgccagcagcagcagcaggaggaggatcaagaagagaacccgagagccggcctggaccctccggcggaggaggaggagtagctgacctgtttcctgaactgcgccgggtgctgactaggtcttcgagtggtcgggagagggggattaagcgggagaggcatgatgagactaatcacagaactgaactgactgtgggtctgatgagtcgcaagcgcccagaaacagtgtggtggcatgaggtgcagtcgactggcacagatgaggtgtcggtgatgcatgagaggttttctctagaacaagtcaagacttgttggttagagcctgaggatgattgggaggtagccatcaggaattatgccaagctggctctgaggccagacaagaagtacaagattactaagctgataaatatcagaaatgcctgctacatctcagggaatggggctgaagtggagatctgtctccaggaaagggtggctttcagatgctgcatgatgaatatgtacccgggagtggtgggcatggatggggttacctttatgaacatgaggttcaggggagatgggtataatggcacggtctttatggccaataccaagctgacagtccatggctgctccttctttgggtttaataacacctgcatcgaggcctggggtcaggtcggtgtgaggggctgcagtttttcagccaactggatgggggtcgtgggcaggaccaagagtatgctgtccgtgaagaaatgcttgtttgagaggtgccacctgggggtgatgagcgagggcgaagccagaatccgccactgcgcctctaccgagacgggctgctttgtgctgtgcaagggcaatgctaagatcaagcataatatgatctgtggagcctcggacgagcgcggctaccagatgctgacctgcgccggcgggaacagccatatgctggccaccgtacatgtggcttcccatgctcgcaagccctggcccgagttcgagcacaatgtcatgaccaggtgcaatatgcatctggggtcccgccgaggcatgttcatgccctaccagtgcaacctgaattatgtgaaggtgctgctggagcccgatgccatgtccagagtgagcctgacgggggtgtttgacatgaatgtggaggtgtggaagattctgagatatgatgaatccaagaccaggtgccgagcctgcgagtgcggagggaagcatgccaggttccagcccgtgtgtgtggatgtgacggaggacctgcgacccgatcatttggtgttgccctgcaccgggacggagttcggttccagcggggaagaatctgactagagtgagtagtgttctggggcgggggaggacctgcatgagggccagaataactgaaatctgtgcttttctgtgtgttgcagcagcatgagcggaagcggctcctttgagggaggggtattcagcccttatctgacggggcgtctcccctcctgggcgggagtgcgtcagaatgtgatgggatccacggtggacggccggcccgtgcagcccgcgaactcttcaaccctgacctatgcaaccctgagctcttcgtcgttggacgcagctgccgccgcagctgctgcatctgccgccagcgccgtgcgcggaatggccatgggcgccggctactacggcactctggtggccaactcgagttccaccaataatcccgccagcctgaacgaggagaagctgttgctgctgatggcccagctcgaggccttgacccagcgcctgggcgagctgacccagcaggtggctcagctgcaggagcagacgcgggccgcggttgccacggtgaaatccaaataaaaaatgaatcaataaataaacggagacggttgttgattttaacacagagtctgaatctttatttgatttttcgcgcgcggtaggccctggaccaccggtctcgatcattgagcacccggtggatcttttccaggacccggtagaggtgggcttggatgttgaggtacatgggcatgagcccgtcccgggggtggaggtagctccattgcagggcctcgtgctcgggggtggtgttgtaaatcacccagtcatagcaggggcgcagggcatggtgttgcacaatatctttgaggaggagactgatggccacgggcagccctttggtgtaggtgtttacaaatctgttgagctgggagggatgcatgcggggggagatgaggtgcatcttggcctggatcttgagattggcgatgttaccgcccagatcccgcctggggttcatgttgtgcaggaccaccagcacggtgtatccggtgcacttggggaatttatcatgcaacttggaagggaaggcgtgaaagaatttggcgacgcctttgtgcccgcccaggttttccatgcactcatccatgatgatggcgatgggcccgtgggcggcggcctgggcaaagacgtttcgggggtcggacacatcatagttgtggtcctgggtgaggtcatcataggccattttaatgaatttggggcggagggtgccggactgggggacaaaggtaccctcgatcccgggggcgtagttcccctcacagatctgcatctcccaggctttgagctcggagggggggatcatgtccacctgcggggcgataaagaacacggtttccggggcgggggagatgagctgggccgaaagcaagttccggagcagctgggacttgccgcagccggtggggccgtagatgaccccgatgaccggctgcaggtggtagttgagggagagacagctgccgtcctcccggaggaggggggccacctcgttcatcatctcgcgcacgtgcatgttctcgcgcaccagttccgccaggaggcgctctccccccagggataggagctcctggagcgaggcgaagtttttcagcggcttgagtccgtcggccatgggcattttggagagggtttgttgcaagagttccaggcggtcccagagctcggtgatgtgctctacggcatctcgatccagcagacctcctcgtttcgcgggttgggacggctgcgggagtagggcaccagacgatgggcgtccagcgcagccagggtccggtccttccagggtcgcagcgtccgcgtcagggtggtctccgtcacggtgaaggggtgcgcgccgggctgggcgcttgcgagggtgcgcttcaggctcatccggctggtcgaaaaccgctcccgatcggcgccctgcgcgtcggccaggtagcaattgaccatgagttcgtagttgagcgcctcggccgcgtggcctttggcgcggagcttacctttggaagtctgcccgcaggcgggacagaggagggacttgagggcgtagagcttgggggcgaggaagacggactcgggggcgtaggcgtccgcgccgcagtgggcgcagacggtctcgcactccacgagccaggtgaggtcgggctggtcggggtcaaaaaccagtttcccgccgttctttttgatgcgtttcttacctttggtctccatgagctcgtgtccccgctgggtgacaaagaggctgtccgtgtccccgtagaccgactttatgggccggtcctcgagcggtgtgccgcggtcctcctcgtagaggaaccccgcccactccgagacgaaagcccgggtccaggccagcacgaaggaggccacgtgggacgggtagcggtcgttgtccaccagcgggtccaccttttccagggtatgcaaacacatgtccccctcgtccacatccaggaaggtgattggcttgtaagtgtaggccacgtgaccgggggtcccggccgggggggtataaaagggtgcgggtccctgctcgtcctcactgtcttccggatcgctgtccaggagcgccagctgttggggtaggtattccctctcgaaggcgggcatgacctcggcactcaggttgtcagtttctagaaacgaggaggatttgatattgacggtgccggcggagatgcctttcaagagcccctcgtccatctggtcagaaaagacgatctttttgttgtcgagcttggtggcgaaggagccgtagagggcgttggagaggagcttggcgatggagcgcatggtctggtttttttccttgtcggcgcgctccttggcggcgatgttgagctgcacgtactcgcgcgccacgcacttccattcggggaagacggtggtcagctcgtcgggcacgattctgacctgccagccccgattatgcagggtgatgaggtccacactggtggccacctcgccgcgcaggggctcattagtccagcagaggcgtccgcccttgcgcgagcagaaggggggcagggggtccagcatgacctcgtcgggggggtcggcatcgatggtgaagatgccgggcaggaggtcggggtcaaagtagctgatggaagtggccagatcgtccagggcagcttgccattcgcgcacggccagcgcgcgctcgtagggactgaggggcgtgccccagggcatgggatgggtaagcgcggaggcgtacatgccgcagatgtcgtagacgtagaggggctcctcgaggatgccgatgtaggtggggtagcagcgccccccgcggatgctggcgcgcacgtagtcatacagctcgtgcgagggggcgaggagccccgggcccaggttggtgcgactgggcttttcggcgcggtagacgatctggcggaaaatggcatgcgagttggaggagatggtgggcctttggaagatgttgaagtgggcgtggggcagtccgaccgagtcgcggatgaagtgggcgtaggagtcttgcagcttggcgacgagctcggcggtgactaggacgtccagagcgcagtagtcgagggtctcctggatgatgtcatacttgagctgtcccttttgtttccacagctcgcggttgagaaggaactcttcgcggtccttccagtactcttcgagggggaacccgtcctgatctgcacggtaagagcctagcatgtagaactggttgacggccttgtaggcgcagcagcccttctccacggggagggcgtaggcctgggcggccttgcgcagggaggtgtgcgtgagggcgaaagtgtccctgaccatgaccttgaggaactggtgcttgaagtcgatatcgtcgcagcccccctgctcccagagctggaagtccgtgcgcttcttgtaggcggggttgggcaaagcgaaagtaacatcgttgaagaggatcttgcccgcgcggggcataaagttgcgagtgatgcggaaaggttggggcacctcggcccggttgttgatgacctgggcggcgagcacgatctcgtcgaagccgttgatgttgtggcccacgatgtagagttccacgaatcgcggacggcccttgacgtggggcagtttcttgagctcctcgtaggtgagctcgtcggggtcgctgagcccgtgctgctcgagcgcccagtcggcgagatgggggttggcgcggaggaaggaagtccagagatccacggccagggcggtttgcagacggtcccggtactgacggaactgctgcccgacggccattttttcgggggtgacgcagtagaaggtgcgggggtccccgtgccagcgatcccatttgagctggagggcgagatcgagggcgagctcgacgagccggtcgtccccggagagtttcatgaccagcatgaaggggacgagctgcttgccgaaggaccccatccaggtgtaggtttccacatcgtaggtgaggaagagcctttcggtgcgaggatgcgagccgatggggaagaactggatctcctgccaccaattggaggaatggctgttgatgtgatggaagtagaaatgccgacggcgcgccgaacactcgtgcttgtgtttatacaagcggccacagtgctcgcaacgctgcacgggatgcacgtgctgcacgagctgtacctgagttcctttgacgaggaatttcagtgggaagtggagtcgtggcgcctgcatctcgtgctgtactacgtcgtggtggtcggcctggccctcttctgcctcgatggtggtcatgctgacgagcccgcgcgggaggcaggtccagacctcggcgcgagcgggtcggagagcgaggacgagggcgcgcaggccggagctgtccagggtcctgagacgctgcggagtcaggtcagtgggcagcggcggcgcgcggttgacttgcaggagtttttccagggcgcgcgggaggtccagatggtacttgatctccaccgcgccattggtggcgacgtcgatggcttgcagggtcccgtgcccctggggtgtgaccaccgtcccccgtttcttcttgggcggctggggcgacgggggcggtgcctcttccatggttagaagcggcggcgaggacgcgcgccgggcggcaggggcggctcggggcccggaggcaggggcggcaggggcacgtcggcgccgcgcgcgggtaggttctggtactgcgcccggagaagactggcgtgagcgacgacgcgacggttgacgtcctggatctgacgcctctgggtgaaggccacgggacccgtgagtttgaacctgaaagagagttcgacagaatcaatctcggtatcgttgacggcggcctgccgcaggatctcttgcacgtcgcccgagttgtcctggtaggcgatctcggtcatgaactgctcgatctcctcctcttgaaggtctccgcggccggcgcgctccacggtggccgcgaggtcgttggagatgcggcccatgagctgcgagaaggcgttcatgcccgcctcgttccagacgcggctgtagaccacgacgccctcgggatcgcgggcgcgcatgaccacctgggcgaggttgagctccacgtggcgcgtgaagaccgcgtagttgcagaggcgctggtagaggtagttgagcgtggtggcgatgtgctcggtgacgaagaaatacatgatccagcggcggagcggcatctcgctgacgtcgcccagcgcctccaaacgttccatggcctcgtaaaagtccacggcgaagttgaaaaactgggagttgcgcgccgagacggtcaactcctcctccagaagacggatgagctcggcgatggtggcgcgcacctcgcgctcgaaggcccccgggagttcctccacttcctcttcttcctcctccactaacatctcttctacttcctcctcaggcggcagtggtggcgggggagggggcctgcgtcgccggcggcgcacgggcagacggtcgatgaagcgctcgatggtctcgccgcgccggcgtcgcatggtctcggtgacggcgcgcccgtcctcgcggggccgcagcgtgaagacgccgccgcgcatctccaggtggccgggggggtccccgttgggcagggagagggcgctgacgatgcatcttatcaattgccccgtagggactccgcgcaaggacctgagcgtctcgagatccacgggatctgaaaaccgctgaacgaaggcttcgagccagtcgcagtcgcaaggtaggctgagcacggtttcttctggcgggtcatgttggttgggagcggggcgggcgatgctgctggtgatgaagttgaaataggcggttctgagacggcggatggtggcgaggagcaccaggtctttgggcccggcttgctggatgcgcagacggtcggccatgccccaggcgtggtcctgacacctggccaggtccttgtagtagtcctgcatgagccgctccacgggcacctcctcctcgcccgcgcggccgtgcatgcgcgtgagcccgaagccgcgctggggctggacgagcgccaggtcggcgacgacgcgctcggcgaggatggcttgctggatctgggtgagggtggtctggaagtcatcaaagtcgacgaagcggtggtaggctccggtgttgatggtgtaggagcagttggccatgacggaccagttgacggtctggtggcccggacgcacgagctcgtggtacttgaggcgcgagtaggcgcgcgtgtcgaagatgtagtcgttgcaggtgcgcaccaggtactggtagccgatgaggaagtgcggcggcggctggcggtagagcggccatcgctcggtggcgggggcgccgggcgcgaggtcctcgagcatggtgcggtggtagccgtagatgtacctggacatccaggtgatgccggcggcggtggtggaggcgcgcgggaactcgcggacgcggttccagatgttgcgcagcggcaggaagtagttcatggtgggcacggtctggcccgtgaggcgcgcgcagtcgtggatgctctatacgggcaaaaacgaaagcggtcagcggctcgactccgtggcctggaggctaagcgaacgggttgggctgcgcgtgtaccccggttcgaatctcgaatcaggctggagccgcagctaacgtggtattggcactcccgtctcgacccaagcctgcaccaaccctccaggatacggaggcgggtcgttttgcaacttttttttggaggccggatgagactagtaagcgcggaaagcggccgaccgcgatggctcgctgccgtagtctggagaagaatcgccagggttgcgttgcggtgtgccccggttcgaggccggccggattccgcggctaacgagggcgtggctgccccgtcgtttccaagaccccatagccagccgacttctccagttacggagcgagcccctcttttgttttgtttgtttttgccagatgcatcccgtactgcggcagatgcgcccccaccaccctccaccgcaacaacagccccctccacagccggcgcttctgcccccgccccagcagcaacttccagccacgaccgccgcggccgccgtgagcggggctggacagagttatgatcaccagctggccttggaagagggcgaggggctggcgcgcctgggggcgtcgtcgccggagcggcacccgcgcgtgcagatgaaaagggacgctcgcgaggcctacgtgcccaagcagaacctgttcagagacaggagcggcgaggagcccgaggagatgcgcgcggcccggttccacgcggggcgggagctgcggcgcggcctggaccgaaagagggtgctgagggacgaggatttcgaggcggacgagctgacggggatcagccccgcgcgcgcgcacgtggccgcggccaacctggtcacggcgtacgagcagaccgtgaaggaggagagcaacttccaaaaatccttcaacaaccacgtgcgcaccctgatcgcgcgcgaggaggtgaccctgggcctgatgcacctgtgggacctgctggaggccatcgtgcagaaccccaccagcaagccgctgacggcgcagctgttcctggtggtgcagcatagtcgggacaacgaagcgttcagggaggcgctgctgaatatcaccgagcccgagggccgctggctcctggacctggtgaacattctgcagagcatcgtggtgcaggagcgcgggctgccgctgtccgagaagctggcggccatcaacttctcggtgctgagtttgggcaagtactacgctaggaagatctacaagaccccgtacgtgcccatagacaaggaggtgaagatcgacgggttttacatgcgcatgaccctgaaagtgctgaccctgagcgacgatctgggggtgtaccgcaacgacaggatgcaccgtgcggtgagcgccagcaggcggcgcgagctgagcgaccaggagctgatgcatagtctgcagcgggccctgaccggggccgggaccgagggggagagctactttgacatgggcgcggacctgcactggcagcccagccgccgggccttggaggcggcggcaggaccctacgtagaagaggtggacgatgaggtggacgaggagggcgagtacctggaagactgatggcgcgaccgtatttttgctagatgcaacaacaacagccacctcctgatcccgcgatgcgggcggcgctgcagagccagccgtccggcattaactcctcggacgattggacccaggccatgcaacgcatcatggcgctgacgacccgcaaccccgaagcctttagacagcagccccaggccaaccggctctcggccatcctggaggccgtggtgccctcgcgctccaaccccacgcacgagaaggtcctggccatcgtgaacgcgctggtggagaacaaggccatccgcggcgacgaggccggcctggtgtacaacgcgctgctggagcgcgtggcccgctacaacagcaccaacgtgcagaccaacctggaccgcatggtgaccgacgtgcgcgaggccgtggcccagcgcgagcggttccaccgcgagtccaacctgggatccatggtggcgctgaacgccttcctcagcacccagcccgccaacgtgccccggggccaggaggactacaccaacttcatcagcgccctgcgcctgatggtgaccgaggtgccccagagcgaggtgtaccagtccgggccggactacttcttccagaccagtcgccagggcttgcagaccgtgaacctgagccaggctttcaagaacttgcagggcctgtggggcgtgcaggccccggtcggggaccgcgcgacggtgtcgagcctgctgacgccgaactcgcgcctgctgctgctgctggtggcccccttcacggacagcggcagcatcaaccgcaactcgtacctgggctacctgattaacctgtaccgcgaggccatcggccaggcgcacgtggacgagcagacctaccaggagatcacccacgtgagccgcgccctgggccaggacgacccgggcaacctggaagccaccctgaactttttgctgaccaaccggtcgcagaagatcccgccccagtacgcgctcagcaccgaggaggagcgcatcctgcgttacgtgcagcagagcgtgggcctgttcctgatgcaggagggggccacccccagcgccgcgctcgacatgaccgcgcgcaacatggagcccagcatgtacgccagcaaccgcccgttcatcaataaactgatggactacttgcatcgggcggccgccatgaactctgactatttcaccaacgccatcctgaatccccactggctcccgccgccggggttctacacgggcgagtacgacatgcccgaccccaatgacgggttcctgtgggacgatgtggacagcagcgtgttctccccccgaccgggtgctaacgagcgccccttgtggaagaaggaaggcagcgaccgacgcccgtcctcggcgctgtccggccgcgagggtgctgccgcggcggtgcccgaggccgccagtcctttcccgagcttgcccttctcgctgaacagtatccgcagcagcgagctgggcaggatcacgcgcccgcgcttgctgggcgaagaggagtacttgaatgactcgctgttgagacccgagcgggagaagaacttccccaataacgggatagaaagcctggtggacaagatgagccgctggaagacgtatgcgcaggagcacagggacgatccccgggcgtcgcagggggccacgagccggggcagcgccgcccgtaaacgccggtggcacgacaggcagcggggacagatgtgggacgatgaggactccgccgacgacagcagcgtgttggacttgggtgggagtggtaacccgttcgctcacctgcgcccccgtatcgggcgcatgatgtaagagaaaccgaaaataaatgatactcaccaaggccatggcgaccagcgtgcgttcgtttcttctctgttgttgttgtatctagtatgatgaggcgtgcgtacccggagggtcctcctccctcgtacgagagcgtgatgcagcaggcgatggcggcggcggcgatgcagcccccgctggaggctccttacgtgcccccgcggtacctggcgcctacggaggggcggaacagcattcgttactcggagctggcacccttgtacgataccacccggttgtacctggtggacaacaagtcggcggacatcgcctcgctgaactaccagaacgaccacagcaacttcctgaccaccgtggtgcagaacaatgacttcacccccacggaggccagcacccagaccatcaactttgacgagcgctcgcggtggggcggccagctgaaaaccatcatgcacaccaacatgcccaacgtgaacgagttcatgtacagcaacaagttcaaggcgcgggtgatggtctcccgcaagacccccaatggggtgacagtgacagaggattatgatggtagtcaggatgagctgaagtatgaatgggtggaatttgagctgcccgaaggcaacttctcggtgaccatgaccatcgacctgatgaacaacgccatcatcgacaattacttggcggtggggcggcagaacggggtgctggagagcgacatcggcgtgaagttcgacactaggaacttcaggctgggctgggaccccgtgaccgagctggtcatgcccggggtgtacaccaacgaggctttccatcccgatattgtcttgctgcccggctgcggggtggacttcaccgagagccgcctcagcaacctgctgggcattcgcaagaggcagcccttccaggaaggcttccagatcatgtacgaggatctggaggggggcaacatccccgcgctcctggatgtcgacgcctatgagaaaagcaaggaggatgcagcagctgaagcaactgcagccgtagctaccgcctctaccgaggtcaggggcgataattttgcaagcgccgcagcagtggcagcggccgaggcggctgaaaccgaaagtaagatagtcattcagccggtggagaaggatagcaagaacaggagctacaacgtactaccggacaagataaacaccgcctaccgcagctggtacctagcctacaactatggcgaccccgagaagggcgtgcgctcctggacgctgctcaccacctcggacgtcacctgcggcgtggagcaagtctactggtcgctgcccgacatgatgcaagacccggtcaccttccgctccacgcgtcaagttagcaactacccggtggtgggcgccgagctcctgcccgtctactccaagagcttcttcaacgagcaggccgtctactcgcagcagctgcgcgccttcacctcgcttacgcacgtcttcaaccgcttccccgagaaccagatcctcgtccgcccgcccgcgcccaccattaccaccgtcagtgaaaacgttcctgctctcacagatcacgggaccctgccgctgcgcagcagtatccggggagtccagcgcgtgaccgttactgacgccagacgccgcacctgcccctacgtctacaaggccctgggcatagtcgcgccgcgcgtcctctcgagccgcaccttctaaatgtccattctcatctcgcccagtaataacaccggttggggcctgcgcgcgcccagcaagatgtacggaggcgctcgccaacgctccacgcaacaccccgtgcgcgtgcgcgggcacttccgcgctccctggggcgccctcaagggccgcgtgcggtcgcgcaccaccgtcgacgacgtgatcgaccaggtggtggccgacgcgcgcaactacacccccgccgccgcgcccgtctccaccgtggacgccgtcatcgacagcgtggtggccgacgcgcgccggtacgcccgcgccaagagccggcggcggcgcatcgcccggcggcaccggagcacccccgccatgcgcgcggcgcgagccttgctgcgcagggccaggcgcacgggacgcagggccatgctcagggcggccagacgcgcggcttcaggcgccagcgccggcaggacccggagacgcgcggccacggcggcggcagcggccatcgccagcatgtcccgcccgcggcgagggaacgtgtactgggtgcgcgacgccgccaccggtgtgcgcgtgcccgtgcgcacccgcccccctcgcacttgaagatgttcacttcgcgatgttgatgtgtcccagcggcgaggaggatgtccaagcgcaaattcaaggaagagatgctccaggtcatcgcgcctgagatctacggccctgcggtggtgaaggaggaaagaaagccccgcaaaatcaagcgggtcaaaaaggacaaaaaggaagaagaaagtgatgtggacggattggtggagtttgtgcgcgagttcgccccccggcggcgcgtgcagtggcgcgggcggaaggtgcaaccggtgctgagacccggcaccaccgtggtcttcacgcccggcgagcgctccggcaccgcttccaagcgctcctacgacgaggtgtacggggatgatgatattctggagcaggcggccgagcgcctgggcgagtttgcttacggcaagcgcagccgttccgcaccgaaggaagaggcggtgtccatcccgctggaccacggcaaccccacgccgagcctcaagcccgtgaccttgcagcaggtgctgccgaccgcggcgccgcgccgggggttcaagcgcgagggcgaggatctgtaccccaccatgcagctgatggtgcccaagcgccagaagctggaagacgtgctggagaccatgaaggtggacccggacgtgcagcccgaggtcaaggtgcggcccatcaagcaggtggccccgggcctgggcgtgcagaccgtggacatcaagattcccacggagcccatggaaacgcagaccgagcccatgatcaagcccagcaccagcaccatggaggtgcagacggatccctggatgccatcggctcctagtcgaagaccccggcgcaagtacggcgcggccagcctgctgatgcccaactacgcgctgcatccttccatcatccccacgccgggctaccgcggcacgcgcttctaccgcggtcataccagcagccgccgccgcaagaccaccactcgccgccgccgtcgccgcaccgccgctgcaaccacccctgccgccctggtgcggagagtgtaccgccgcggccgcgcacctctgaccctgccgcgcgcgcgctaccacccgagcatcgccatttaaactttcgcctgctttgcagatcaatggccctcacatgccgccttcgcgttcccattacgggctaccgaggaagaaaaccgcgccgtagaaggctggcggggaacgggatgcgtcgccaccaccaccggcggcggcgcgccatcagcaagcggttggggggaggcttcctgcccgcgctgatccccatcatcgccgcggcgatcggggcgatccccggcattgcttccgtggcggtgcaggcctctcagcgccactgagacacacttggaaacatcttgtaataaaccaatggactctgacgctcctggtcctgtgatgtgttttcgtagacagatggaagacatcaatttttcgtccctggctccgcgacacggcacgcggccgttcatgggcacctggagcgacatcggcaccagccaactgaacgggggcgccttcaattggagcagtctctggagcgggcttaagaatttcgggtccacgcttaaaacctatggcagcaaggcgtggaacagcaccacagggcaggcgctgagggataagctgaaagagcagaacttccagcagaaggtggtcgatgggctcgcctcgggcatcaacggggtggtggacctggccaaccaggccgtgcagcggcagatcaacagccgcctggacccggtgccgcccgccggctccgtggagatgccgcaggtggaggaggagctgcctcccctggacaagcggggcgagaagcgaccccgccccgatgcggaggagacgctgctgacgcacacggacgagccgcccccgtacgaggaggcggtgaaactgggtctgcccaccacgcggcccatcgcgcccctggccaccggggtgctgaaacccgaaaagcccgcgaccctggacttgcctcctccccagccttcccgcccctctacagtggctaagcccctgccgccggtggccgtggcccgcgcgcgacccgggggcaccgcccgccctcatgcgaactggcagagcactctgaacagcatcgtgggtctgggagtgcagagtgtgaagcgccgccgctgctattaaacctaccgtagcgcttaacttgcttgtctgtgtgtgtatgtattatgtcgccgccgccgctgtccaccagaaggaggagtgaagaggcgcgtcgccgagttgcaagatggccaccccatcgatgctgccccagtgggcgtacatgcacatcgccggacaggacgcttcggagtacctgagtccgggtctggtgcagtttgcccgcgccacagacacctacttcagtctggggaacaagtttaggaaccccacggtggcgcccacgcacgatgtgaccaccgaccgcagccagcggctgacgctgcgcttcgtgcccgtggaccgcgaggacaacacctactcgtacaaagtgcgctacacgctggccgtgggcgacaaccgcgtgctggacatggccagcacctactttgacatccgcggcgtgctggatcggggccctagcttcaaaccctactccggcaccgcctacaacagtctggcccccaagggagcacccaacacttgtcagtggacatataaagccgatggtgaaactgccacagaaaaaacctatacatatggaaatgcacccgtgcagggcattaacatcacaaaagatggtattcaacttggaactgacaccgatgatcagccaatctacgcagataaaacctatcagcctgaacctcaagtgggtgatgctgaatggcatgacatcactggtactgatgaaaagtatggaggcagagctcttaagcctgataccaaaatgaagccttgttatggttcttttgccaagcctactaataaagaaggaggtcaggcaaatgtgaaaacaggaacaggcactactaaagaatatgacatagacatggctttctttgacaacagaagtgcggctgctgctggcctagctccagaaattgttttgtatactgaaaatgtggatttggaaactccagatacccatattgtatacaaagcaggcacagatgacagcagctcttctattaatttgggtcagcaagccatgcccaacagacctaactacattggtttcagagacaactttatcgggctcatgtactacaacagcactggcaatatgggggtgctggccggtcaggcttctcagctgaatgctgtggttgacttgcaagacagaaacaccgagctgtcctaccagctcttgcttgactctctgggtgacagaacccggtatttcagtatgtggaatcaggcggtggacagctatgatcctgatgtgcgcattattgaaaatcatggtgtggaggatgaacttcccaactattgtttccctctggatgctgttggcagaacagatacttatcagggaattaaggctaatggaactgatcaaaccacatggaccaaagatgacagtgtcaatgatgctaatgagataggcaagggtaatccattcgccatggaaatcaacatccaagccaacctgtggaggaacttcctctacgccaacgtggccctgtacctgcccgactcttacaagtacacgccggccaatgttaccctgcccaccaacaccaacacctacgattacatgaacggccgggtggtggcgccctcgctggtggactcctacatcaacatcggggcgcgctggtcgctggatcccatggacaacgtgaaccccttcaaccaccaccgcaatgcggggctgcgctaccgctccatgctcctgggcaacgggcgctacgtgcccttccacatccaggtgccccagaaatttttcgccatcaagagcctcctgctcctgcccgggtcctacacctacgagtggaacttccgcaaggacgtcaacatgatcctgcagagctccctcggcaacgacctgcgcacggacggggcctccatctccttcaccagcatcaacctctacgccaccttcttccccatggcgcacaacacggcctccacgctcgaggccatgctgcgcaacgacaccaacgaccagtccttcaacgactacctctcggcggccaacatgctctaccccatcccggccaacgccaccaacgtgcccatctccatcccctcgcgcaactgggccgccttccgcggctggtccttcacgcgtctcaagaccaaggagacgccctcgctgggctccgggttcgacccctacttcgtctactcgggctccatcccctacctcgacggcaccttctacctcaaccacaccttcaagaaggtctccatcaccttcgactcctccgtcagctggcccggcaacgaccggctcctgacgcccaacgagttcgaaatcaagcgcaccgtcgacggcgagggctacaacgtggcccagtgcaacatgaccaaggactggttcctggtccagatgctggcccactacaacatcggctaccagggcttctacgtgcccgagggctacaaggaccgcatgtactccttcttccgcaacttccagcccatgagccgccaggtggtggacgaggtcaactacaaggactaccaggccgtcaccctggcctaccagcacaacaactcgggcttcgtcggctacctcgcgcccaccatgcgccagggccagccctaccccgccaactacccctacccgctcatcggcaagagcgccgtcaccagcgtcacccagaaaaagttcctctgcgacagggtcatgtggcgcatccccttctccagcaacttcatgtccatgggcgcgctcaccgacctcggccagaacatgctctatgccaactccgcccacgcgctagacatgaatttcgaagtcgaccccatggatgagtccacccttctctatgttgtcttcgaagtcttcgacgtcgtccgagtgcaccagccccaccgcggcgtcatcgaggccgtctacctgcgcacccccttctcggccggtaacgccaccacctaagctcttgcttcttgcaagccatggccgcgggctccggcgagcaggagctcagggccatcatccgcgacctgggctgcgggccctacttcctgggcaccttcgataagcgcttcccgggattcatggccccgcacaagctggcctgcgccatcgtcaacacggccggccgcgagaccgggggcgagcactggctggccttcgcctggaacccgcgctcgaacacctgctacctcttcgaccccttcgggttctcggacgagcgcctcaagcagatctaccagttcgagtacgagggcctgctgcgccgcagcgccctggccaccgaggaccgctgcgtcaccctggaaaagtccacccagaccgtgcagggtccgcgctcggccgcctgcgggctcttctgctgcatgttcctgcacgccttcgtgcactggcccgaccgccccatggacaagaaccccaccatgaacttgctgacgggggtgcccaacggcatgctccagtcgccccaggtggaacccaccctgcgccgcaaccaggaggcgctctaccgcttcctcaactcccactccgcctactttcgctcccaccgcgcgcgcatcgagaaggccaccgccttcgaccgcatgaatcaagacatgtaaaccgtgtgtgtatgttaaatgtctttaataaacagcactttcatgttacacatgcatctgagatgatttatttagaaatcgaaagggttctgccgggtctcggcatggcccgcgggcagggacacgttgcggaactggtacttggccagccacttgaactcggggatcagcagtttgggcagcggggtgtcggggaaggagtcggtccacagcttccgcgtcagttgcagggcgcccagcaggtcgggcgcggagatcttgaaatcgcagttgggacccgcgttctgcgcgcgggagttgcggtacacggggttgcagcactggaacaccatcagggccgggtgcttcacgctcgccagcaccgtcgcgtcggtgatgctctccacgtcgaggtcctcggcgttggccatcccgaagggggtcatcttgcaggtctgccttcccatggtgggcacgcacccgggcttgtggttgcaatcgcagtgcagggggatcagcatcatctgggcctggtcggcgttcatccccgggtacatggccttcatgaaagcctccaattgcctgaacgcctgctgggccttggctccctcggtgaagaagaccccgcaggacttgctagagaactggttggtggcgcacccggcgtcgtgcacgcagcagcgcgcgtcgttgttggccagctgcaccacgctgcgcccccagcggttctgggtgatcttggcccggtcggggttctccttcagcgcgcgctgcccgttctcgctcgccacatccatctcgatcatgtgctccttctggatcatggtggtcccgtgcaggcaccgcagcttgccctcggcctcggtgcacccgtgcagccacagcgcgcacccggtgcactcccagttcttgtgggcgatctgggaatgcgcgtgcacgaagccctgcaggaagcggcccatcatggtggtcagggtcttgttgctagtgaaggtcagcggaatgccgcggtgctcctcgttgatgtacaggtggcagatgcggcggtacacctcgccctgctcgggcatcagctggaagttggctttcaggtcggtctccacgcggtagcggtccatcagcatagtcatgatttccatacccttctcccaggccgagacgatgggcaggctcatagggttcttcaccatcatcttagcgctagcagccgcggccagggggtcgctctcgtccagggtctcaaagctccgcttgccgtccttctcggtgatccgcaccggggggtagctgaagcccacggccgccagctcctcctcggcctgtctttcgtcctcgctgtcctggctgacgtcctgcaggaccacatgcttggtcttgcggggtttcttcttgggcggcagcggcggcggagatgttggagatggcgagggggagcgcgagttctcgctcaccactactatctcttcctcttcttggtccgaggccacgcggcggtaggtatgtctcttcgggggcagaggcggaggcgacgggctctcgccgccgcgacttggcggatggctggcagagccccttccgcgttcgggggtgcgctcccggcggcgctctgactgacttcctccgcggccggccattgtgttctcctagggaggaacaacaagcatggagactcagccatcgccaacctcgccatctgcccccaccgccgacgagaagcagcagcagcagaatgaaagcttaaccgccccgccgcccagccccgccacctccgacgcggccgtcccagacatgcaagagatggaggaatccatcgagattgacctgggctatgtgacgcccgcggagcacgaggaggagctggcagtgcgcttttcacaagaagagatacaccaagaacagccagagcaggaagcagagaatgagcagagtcaggctgggctcgagcatgacggcgactacctccacctgagcgggggggaggacgcgctcatcaagcatctggcccggcaggccaccatcgtcaaggatgcgctgctcgaccgcaccgaggtgcccctcagcgtggaggagctcagccgcgcctacgagttgaacctcttctcgccgcgcgtgccccccaagcgccagcccaatggcacctgcgagcccaacccgcgcctcaacttctacccggtcttcgcggtgcccgaggccctggccacctaccacatctttttcaagaaccaaaagatccccgtctcctgccgcgccaaccgcacccgcgccgacgcccttttcaacctgggtcccggcgcccgcctacctgatatcgcctccttggaagaggttcccaagatcttcgagggtctgggcagcgacgagactcgggccgcgaacgctctgcaaggagaaggaggagagcatgagcaccacagcgccctggtcgagttggaaggcgacaacgcgcggctggcggtgctcaaacgcacggtcgagctgacccatttcgcctacccggctctgaacctgccccccaaagtcatgagcgcggtcatggaccaggtgctcatcaagcgcgcgtcgcccatctccgaggacgagggcatgcaagactccgaggagggcaagcccgtggtcagcgacgagcagctggcccggtggctgggtcctaatgctagtccccagagtttggaagagcggcgcaaactcatgatggccgtggtcctggtgaccgtggagctggagtgcctgcgccgcttcttcgccgacgcggagaccctgcgcaaggtcgaggagaacctgcactacctcttcaggcacgggttcgtgcgccaggcctgcaagatctccaacgtggagctgaccaacctggtctcctacatgggcatcttgcacgagaaccgcctggggcagaacgtgctgcacaccaccctgcgcggggaggcccggcgcgactacatccgcgactgcgtctacctctacctctgccacacctggcagacgggcatgggcgtgtggcagcagtgtctggaggagcagaacctgaaagagctctgcaagctcctgcagaagaacctcaagggtctgtggaccgggttcgacgagcgcaccaccgcctcggacctggccgacctcattttccccgagcgcctcaggctgacgctgcgcaacggcctgcccgactttatgagccaaagcatgttgcaaaactttcgctctttcatcctcgaacgctccggaatcctgcccgccacctgctccgcgctgccctcggacttcgtgccgctgaccttccgcgagtgccccccgccgctgtggagccactgctacctgctgcgcctggccaactacctggcctaccactcggacgtgatcgaggacgtcagcggcgagggcctgctcgagtgccactgccgctgcaacctctgcacgccgcaccgctccctggcctgcaacccccagctgctgagcgagacccagatcatcggcaccttcgagttgcaagggcccagcgaaggcgagggttcagccgccaaggggggtctgaaactcaccccggggctgtggacctcggcctacttgcgcaagttcgtgcccgaggactaccatcccttcgagatcaggttctacgaggaccaatcccatccgcccaaggccgagctgtcggcctgcgtcatcacccagggggcgatcctggcccaattgcaagccatccagaaatcccgccaagaattcttgctgaaaaagggccgcggggtctacctcgacccccagaccggtgaggagctcaaccccggcttcccccaggatgccccgaggaaacaagaagctgaaagtggagctgccgcccgtggaggatttggaggaagactgggagaacagcagtcaggcagaggaggaggagatggaggaagactgggacagcactcaggcagaggaggacagcctgcaagacagtctggaggaagacgaggaggaggcagaggaggaggtggaagaagcagccgccgccagaccgtcgtcctcggcgggggagaaagcaagcagcacggataccatctccgctccgggtcggggtcccgctcgaccacacagtagatgggacgagaccggacgattcccgaaccccaccacccagaccggtaagaaggagcggcagggatacaagtcctggcgggggcacaaaaacgccatcgtctcctgcttgcaggcctgcgggggcaacatctccttcacccggcgctacctgctcttccaccgcggggtgaactttccccgcaacatcttgcattactaccgtcacctccacagcccctactacttccaagaagaggcagcagcagcagaaaaagaccagcagaaaaccagcagctagaaaatccacagcggcggcagcaggtggactgaggatcgcggcgaacgagccggcgcaaacccgggagctgaggaaccggatctttcccaccctctatgccatcttccagcagagtcgggggcaggagcaggaactgaaagtcaagaaccgttctctgcgctcgctcacccgcagttgtctgtatcacaagagcgaagaccaacttcagcgcactctcgaggacgccgaggctctcttcaacaagtactgcgcgctcactcttaaagagtagcccgcgcccgcccagtcgcagaaaaaggcgggaattacgtcacctgtgcccttcgccctagccgcctccacccatcatcatgagcaaagagattcccacgccttacatgtggagctaccagccccagatgggcctggccgccggtgccgcccaggactactccacccgcatgaattggctcagcgccgggcccgcgatgatctcacgggtgaatgacatccgcgcccaccgaaaccagatactcctagaacagtcagcgctcaccgccacgccccgcaatcacctcaatccgcgtaattggcccgccgccctggtgtaccaggaaattccccagcccacgaccgtactacttccgcgagacgcccaggccgaagtccagctgactaactcaggtgtccagctggcgggcggcgccaccctgtgtcgtcaccgccccgctcagggtataaagcggctggtgatccggggcagaggcacacagctcaacgacgaggtggtgagctcttcgctgggtctgcgacctgacggagtcttccaactcgccggatcggggagatcttccttcacgcctcgtcaggccgtcctgactttggagagttcgtcctcgcagccccgctcgggtggcatcggcactctccagttcgtggaggagttcactccctcggtctacttcaaccccttctccggctcccccggccactacccggacgagttcatcccgaacttcgacgccatcagcgagtcggtggacggctacgattgaatgtcccatggtggcgcagctgacctagctcggcttcgacacctggaccactgccgccgcttccgctgcttcgctcgggatctcgccgagtttgcctactttgagctgcccgaggagcaccctcagggcccggcccacggagtgcggatcgtcgtcgaagggggcctcgactcccacctgcttcggatcttcagccagcgtccgatcctggtcgagcgcgagcaaggacagacccttctgactctgtactgcatctgcaaccaccccggcctgcatgaaagtctttgttgtctgctgtgtactgagtataataaaagctgagatcagcgactactccggacttccgtgtgttcctgaatccatcaaccagtctttgttcttcaccgggaacgagaccgagctccagctccagtgtaagccccacaagaagtacctcacctggctgttccagggctccccgatcgccgttgtcaaccactgcgacaacgacggagtcctgctgagcggccctgccaaccttactttttccacccgcagaagcaagctccagctcttccaacccttcctccccgggacctatcagtgcgtctcgggaccctgccatcacaccttccacctgatcccgaataccacagcgtcgctccccgctactaacaaccaaactaacctccaccaacgccaccgtcgcgacctttctgaatctaatactaccacccacaccggaggtgagctccgaggtcaaccaacctctgggatttactacggcccctgggaggtggttgggttaatagcgctaggcctagttgcgggtgggcttttggttctctgctacctatacctcccttgctgttcgtacttagtggtgctgtgttgctggtttaagaaatggggaagatcaccctagtgagctgcggtgcgctggtggcggtgttgctttcgattgtgggactgggcggtgcggctgtagtgaaggagaaggccgatccctgcttgcatttcaatcccaacaaatgccagctgagttttcagcccgatggcaatcggtgcgcggtactgatcaagtgcggatgggaatgcgagaacgtgagaatcgagtacaataacaagactcggaacaatactctcgcgtccgtgtggcagcccggggaccccgagtggtacaccgtctctgtccccggtgctgacggctccccgcgcaccgtgaataatactttcatttttgcgcacatgtgcgacacggtcatgtggatgagcaagcagtacgatatgtggccccccacgaaggagaacatcgtggtcttctccatcgcttacagcctgtgcacggcgctaatcaccgctatcgtgtgcctgagcattcacatgctcatcgctattcgccccagaaataatgccgaaaaagaaaaacagccataacgttttttttcacacctttttcagaccatggcctctgttaaatttttgcttttatttgccagtctcattgccgtcattcatggaatgagtaatgagaaaattactatttacactggcactaatcacacattgaaaggtccagaaaaagccacagaagtttcatggtattgttattttaatgaatcagatgtatctactgaactctgtggaaacaataacaaaaaaaatgagagcattactctcatcaagtttcaatgtggatctgacttaaccctaattaacatcactagagactatgtaggtatgtattatggaactacagcaggcatttcggacatggaattttatcaagtttctgtgtctgaacccaccacgcctagaatgaccacaaccacaaaaactacacctgttaccactatgcagctcactaccaataacatttttgccatgcgtcaaatggtcaacaatagcactcaacccaccccacccagtgaggaaattcccaaatccatgattggcattattgttgctgtagtggtgtgcatgttgatcatcgccttgtgcatggtgtactatgccttctgctacagaaagcacagactgaacgacaagctggaacacttactaagtgttgaattttaattttttagaaccatgaagatcctaggccttttaattttttctatcattacctctgctctatgcaattctgacaatgaggacgttactgtcgttgtcggatcaaattatacactgaaaggtccagcgaagggtatgctttcgtggtattgctattttggatctgacactacagaaactgaattatgcaatcttaagaatggcaaaattcaaaattctaaaattaacaattatatatgcaatggtactgatctgatactcctcaatatcacgaaatcatatgctggcagttacacctgccctggagatgatgctgacagtatgattttttacaaagtaactgttgttgatcccactactccacctccacccaccacaactactcacaccacacacacagatcaaaccgcagcagaggaggcagcaaagttagccttgcaggtccaagacagttcatttgttggcattacccctacacctgatcagcggtgtccggggctgctagtcagcggcattgtcggtgtgctttcgggattagcagtcataatcatctgcatgttcatttttgcttgctgctatagaaggctttaccgacaaaaatcagacccactgctgaacctctatgtttaattttttccagagtcatgaaggcagttagcgctctagttttttgttctttgattggcattgttttttgcaatcctattcctaaagttagctttattaaagatgtgaatgttactgaggggggcaatgtgacactggtaggtgtagagggtgctgaaaacaccacctggacaaaataccacctcaatgggtggaaagatatttgcaattggagtgtattagtttatacatgtgagggagttaatcttaccattgtcaatgccacctcagctcaaaatggtagaattcaaggacaaagtgtcagtgtatctaatgggtattttacccaacatacttttatctatgacgttaaagtcataccactgcctacgcctagcccacctagcactaccacacagacaacccacactacacagacaaccacatacagtacattaaatcagcctaccaccactacagcagcagaggttgccagctcgtctggggtccgagtggcatttttgatgttggccccatctagcagtcccactgctagtaccaatgagcagactactgaatttttgtccactgtcgagagccacaccacagctacctccagtgccttctctagcaccgccaatctctcctcgctttcctctacaccaatcagtcccgctactactcctagccccgctcctcttcccactcccctgaagcaaacagacggcggcatgcaatggcagatcaccctgctcattgtgatcgggttggtcatcctggccgtgttgctctactacatcttctgccgccgcattcccaacgcgcaccgcaagccggtctacaagcccatcattgtcgggcagccggagccgcttcaggtggaagggggtctaaggaatcttctcttctcttttacagtatggtgattgaactatgattcctagacaattcttgatcactattcttatctgcctcctccaagtctgtgccaccctcgctctggtggccaacgccagtccagactgtattgggcccttcgcctcctacgtgctctttgccttcaccacctgcatctgctgctgtagcatagtctgcctgcttatcaccttcttccagttcattgactggatctttgtgcgcatcgcctacctgcgccaccacccccagtaccgcgaccagcgagtggcgcggctgctcaggctcctctgataagcatgcgggctctgctacttctcgcgcttctgctgttagtgctcccccgtcccgtcgacccccggtcccccacccagtcccccgaggaggtccgcaaatgcaaattccaagaaccctggaaattcctcaaatgctaccgccaaaaatcagacatgcatcccagctggatcatgatcattgggatcgtgaacattctggcctgcaccctcatctcctttgtgatttacccctgctttgactttggttggaactcgccagaggcgctctatctcccgcctgaacctgacacaccaccacagcaacctcaggcacacgcactaccaccactacagcctaggccacaatacatgcccatattagactatgaggccgagccacagcgacccatgctccccgctattagttacttcaatctaaccggcggagatgactgacccactggccaacaacaacgtcaacgaccttctcctggacatggacggccgcgcctcggagcagcgactcgcccaacttcgcattcgccagcagcaggagagagccgtcaaggagctgcaggatgcggtggccatccaccagtgcaagagaggcatcttctgcctggtgaaacaggccaagatctcctacgaggtcactccaaacgaccatcgcctctcctacgagctcctgcagcagcgccagaagttcacctgcctggtcggagtcaaccccatcgtcatcacccagcagtctggcgataccaaggggtgcatccactgctcctgcgactcccccgactgcgtccacactctgatcaagaccctctgcggcctccgcgacctcctccccatgaactaatcacccccttatccagtgaaataaagatcatattgatgatgattttacagaaataaaaaataatcatttgatttgaaataaagatacaatcatattgatgatttgagtttaacaaaaaaataaagaatcacttacttgaaatctgataccaggtctctgtccatgttttctgccaacaccacttcactcccctcttcccagctctggtactgcaggccccggcgggctgcaaacttcctccacacgctgaaggggatgtcaaattcctcctgtccctcaatcttcattttatcttctatcagatgtccaaaaagcgcgtccgggtggatgatgacttcgaccccgtctacccctacgatgcagacaacgcaccgaccgtgcccttcatcaacccccccttcgtctcttcagatggattccaagagaagcccctgggggtgttgtccctgcgactggccgaccccgtcaccaccaagaacggggaaatcaccctcaagctgggagagggggtggacctcgattcctcgggaaaactcatctccaacacggccaccaaggccgccgcccctctcagtttttccaacaacaccatttcccttaacatggatcaccccttttacactaaagatggaaaattatccttacaagtttctccaccattaaatatactgagaacaagcattctaaacacactagctttaggttttggatcaggtttaggactccgtggctctgccttggcagtacagttagtctctccacttacatttgatactgatggaaacataaagcttaccttagacagaggtttgcatgttacaacaggagatgcaattgaaagcaacataagctgggctaaaggtttaaaatttgaagatggagccatagcaaccaacattggaaatgggttagagtttggaagcagtagtacagaaacaggtgttgatgatgcttacccaatccaagttaaacttggatctggccttagctttgacagtacaggagccataatggctggtaacaaagaagacgataaactcactttgtggacaacacctgatccatcaccaaactgtcaaatactcgcagaaaatgatgcaaaactaacactttgcttgactaaatgtggtagtcaaatactggccactgtgtcagtcttagttgtaggaagtggaaacctaaaccccattactggcaccgtaagcagtgctcaggtgtttctacgttttgatgcaaacggtgttcttttaacagaacattctacactaaaaaaatactgggggtataggcagggagatagcatagatggcactccatataccaatgctgtaggattcatgcccaatttaaaagcttatccaaagtcacaaagttctactactaaaaataatatagtagggcaagtatacatgaatggagatgtttcaaaacctatgcttctcactataaccctcaatggtactgatgacagcaacagtacatattcaatgtcattttcatacacctggactaatggaagctatgttggagcaacatttggggctaactcttataccttctcatacatcgcccaagaatgaacactgtatcccaccctgcatgccaacccttcccaccccactctgtggaacaaactctgaaacacaaaataaaataaagttcaagtgttttattgattcaacagttttacaggattcgagcagttatttttcctccaccctcccaggacatggaatacaccaccctctccccccgcacagccttgaacatctgaatgccattggtgatggacatgcttttggtctccacgttccacacagtttcagagcgagccagtctcgggtcggtcagggagatgaaaccctccgggcactcccgcatctgcacctcacagctcaacagctgaggattgtcctcggtggtcgggatcacggttatctggaagaagcagaagagcggcggtgggaatcatagtccgcgaacgggatcggccggtggtgtcgcatcaggccccgcagcagtcgctgccgccgccgctccgtcaagctgctgctcagggggtccgggtccagggactccctcagcatgatgcccacggccctcagcatcagtcgtctggtgcggcgggcgcagcagcgcatgcggatctcgctcaggtcgctgcagtacgtgcaacacagaaccaccaggttgttcaacagtccatagttcaacacgctccagccgaaactcatcgcgggaaggatgctacccacgtggccgtcgtaccagatcctcaggtaaatcaagtggtgccccctccagaacacgctgcccacgtacatgatctccttgggcatgtggcggttcaccacctcccggtaccacatcaccctctggttgaacatgcagccccggatgatcctgcggaaccacagggccagcaccgccccgcccgccatgcagcgaagagaccccgggtcccggcaatggcaatggaggacccaccgctcgtacccgtggatcatctgggagctgaacaagtctatgttggcacagcacaggcatatgctcatgcatctcttcagcactctcaactcctcgggggtcaaaaccatatcccagggcacggggaactcttgcaggacagcgaaccccgcagaacagggcaatcctcgcacagaacttacattgtgcatggacagggtatcgcaatcaggcagcaccgggtgatcctccaccagagaagcgcgggtctcggtctcctcacagcgtggtaagggggccggccgatacgggtgatggcgggacgcggctgatcgtgttcgcgaccgtgtcatgatgcagttgctttcggacattttcgtacttgctgtagcagaacctggtccgggcgctgcacaccgatcgccggcggcggtctcggcgcttggaacgctcggtgttgaaattgtaaaacagccactctctcagaccgtgcagcagatctagggcctcaggagtgatgaagatcccatcatgcctgatggctctgatcacatcgaccaccgtggaatgggccagacccagccagatgatgcaattttgttgggtttcggtgacggcgggggagggaagaacaggaagaaccatgattaacttttaatccaaacggtctcggagtacttcaaaatgaagatcgcggagatggcacctctcgcccccgctgtgttggtggaaaataacagccaggtcaaaggtgatacggttctcgagatgttccacggtggcttccagcaaagcctccacgcgcacatccagaaacaagacaatagcgaaagcgggagggttctctaattcctcaatcatcatgttacactcctgcaccatccccagataattttcatttttccagccttgaatgattcgaactagttcctgaggtaaatccaagccagccatgataaagagctcgcgcagagcgccctccaccggcattcttaagcacaccctcataattccaagatattctgctcctggttcacctgcagcagattgacaagcggaatatcaaaatctctgccgcgatccctgagctcctccctcagcaataactgtaagtactctttcatatcctctccgaaatttttagccataggaccaccaggaataagattagggcaagccacagtacagataaaccgaagtcctccccagtgagcattgccaaatgcaagactgctataagcatgctggctagacccggtgatatcttccagataactggacagaaaatcgcccaggcaatttttaagaaaatcaacaaaagaaaaatcctccaggtggacgtttagagcctcgggaacaacgatgaagtaaatgcaagcggtgcgttccagcatggttagttagctgatctgtagaaaaaacaaaaatgaacattaaaccatgctagcctggcgaacaggtgggtaaatcgttctctccagcaccaggcaggccacggggtctccggcgcgaccctcgtaaaaattgtcgctatgattgaaaaccatcacagagagacgttcccggtggccggcgtgaatgattcgacaagatgaatacacccccggaacattggcgtccgcgagtgaaaaaaagcgcccgaggaagcaataaggcactacaatgctcagtctcaagtccagcaaagcgatgccatgcggatgaagcacaaaattctcaggtgcgtacaaaatgtaattactcccctcctgcacaggcagcaaagcccccgatccctccaggtacacatacaaagcctcagcgtccatagcttaccgagcagcagcacacaacaggcgcaagagtcagagaaaggctgagctctaacctgtccacccgctctctgctcaatatatagcccagatctacactgacgtaaaggccaaagtctaaaaatacccgccaaataatcacacacgcccagcacacgcccagaaaccggtgacacactcaaaaaaatacgcgcacttcctcaaacgcccaaaactgccgtcatttccgggttcccacgctacgtcatcaaaacacgactttcaaattccgtcgaccgttaaaaacgtcacccgccccgcccctaacggtcgcccgtctctcagccaatcagcgccccgcatccccaaattcaaacacctcatttgcatattaacgcgcacaaaaagtttgaggtatattattgatgatgg

SEQ ID NO: 11 - DNA, 31867 bp, Artificial Sequence
  Description of Artificial Sequence: Synthetic polynucleotide
ccatcttcaataatatacctcaaactttttgtgcgcgttaatatgcaaatgaggcgtttgaatttggggaggaagggcggtgattggtcgagggatgagcgaccgttaggggcggggcgagtgacgttttgatgacgtggttgcgaggaggagccagtttgcaagttctcgtgggaaaagtgacgtcaaacgaggtgtggtttgaacacggaaatactcaattttcccgcgctctctgacaggaaatgaggtgtttctgggcggatgcaagtgaaaacgggccattttcgcgcgaaaactgaatgaggaagtgaaaatctgagtaatttcgcgtttatggcagggaggagtatttgccgagggccgagtagactttgaccgattacgtgggggtttcgattaccgtgtttttcacctaaatttccgcgtacggtgtcaaagtccggtgtttttacgtaggtgtcagctgatcgccagggtatttaaacctgcgctctccagtcaagaggccactcttgagtgccagcgagaagagttttctcctccgcgccgcgagtcagatctacactttgaaagtagggataacagggtaatgacattgattattgactagttgttaatagtaatcaattacggggtcattagttcatagcccatatatggagttccgcgttacataacttacggtaaatggcccgcctggctgaccgcccaacgacccccgcccattgacgtcaataatgacgtatgttcccatagtaacgccaatagggactttccattgacgtcaatgggtggagtatttacggtaaactgcccacttggcagtacatcaagtgtatcatatgccaagtccgccccctattgacgtcaatgacggtaaatggcccgcctggcattatgcccagtacatgaccttacgggactttcctacttggcagtacatctacgtattagtcatcgctattaccatggtgatgcggttttggcagtacaccaatgggcgtggatagcggtttgactcacggggatttccaagtctccaccccattgacgtcaatgggagtttgttttggcaccaaaatcaacgggactttccaaaatgtcgtaataaccccgccccgttgacgcaaatgggcggtaggcgtgtacggtgggaggtctatataagcagagctcgtttagtgaaccgtcagatcgcctggaacgccatccacgctgttttgacctccatagaagacagcgatcgcgccaccatggtgagcaagggcgaggagctgttcaccggggtggtgcccatcctggtcgagctggacggcgacgtaaacggccacaagttcagcgtgtccggcgagggcgagggcgatgccacctacggcaagctgaccctgaagttcatctgcaccaccggcaagctgcccgtgccctggcccaccctcgtgaccaccctgacctacggcgtgcagtgcttcagccgctaccccgaccacatgaagcagcacgacttcttcaagtccgccatgcccgaaggctacgtccaggagcgcaccatcttcttcaaggacgacggcaactacaagacccgcgccgaggtgaagttcgagggcgacaccctggtgaaccgcatcgagctgaagggcatcgacttcaaggaggacggcaacatcctggggcacaagctggagtacaactacaacagccacaacgtctatatcatggccgacaagcagaagaacggcatcaaggtgaacttcaagatccgccacaacatcgaggacggcagcgtgcagctcgccgaccactaccagcagaacacccccatcggcgacggccccgtgctgctgcccgacaaccactacctgagcacccagtccgccctgagcaaagaccccaacgagaagcgcgatcacatggtcctgctggagttcgtgaccgccgccgggatcactctcggcatggacgagctttacaagtagtgagtttaaactcccatttaaatgtgagggttaatgcttcgagcagacatgataagatacattgatgagtttggacaaaccacaactagaatgcagtgaaaaaaatgctttatttgtgaaatttgtgatgctattgctttatttgtaaccattataagctgcaataaacaagttaacaacaacaattgcattcattttatgtttcaggttcagggggagatgtgggaggttttttaaagcaagtaaaacctctacaaatgtggtaaaataactataacggtcctaaggtagcgagtgagtagtgttctggggcgggggaggacctgcatgagggccagaataactgaaatctgtgcttttctgtgtgttgcagcagcatgagcggaagcggctcctttgagggaggggtattcagcccttatctgacggggcgtctcccctcctgggcgggagtgcgtcagaatgtgatgggatccacggtggacggccggcccgtgcagcccgcgaactcttcaaccctgacctatgcaaccctgagctcttcgtcgttggacgcagctgccgccgcagctgctgcatctgccgccagcgccgtgcgcggaatggccatgggcgccggctactacggcactctggtggccaactcgagttccaccaataatcccgccagcctgaacgaggagaagctgttgctgctgatggcccagctcgaggccttgacccagcgcctgggcgagctgacccagcaggtggctcagctgcaggagcagacgcgggccgcggttgccacggtgaaatccaaataaaaaatgaatcaataaataaacggagacggttgttgattttaacacagagtctgaatctttatttgatttttcgcgcgcggtaggccctggaccaccggtctcgatcattgagcacccggtggatcttttccaggacccggtagaggtgggcttggatgttgaggtacatgggcatgagcccgtcccgggggtggaggtagctccattgcagggcctcgtgctcgggggtggtgttgtaaatcacccagtcatagcaggggcgcagggcatggtgttgcacaatatctttgaggaggagactgatggccacgggcagccctttggtgtaggtgtttacaaatctgttgagctgggagggatgcatgcggggggagatgaggtgcatcttggcctggatcttgagattggcgatgttaccgcccagatcccgcctggggttcatgttgtgcaggaccaccagcacggtgtatccggtgcacttggggaatttatcatgcaacttggaagggaaggcgtgaaagaatttggcgacgcctttgtgcccgcccaggttttccatgcactcatccatgatgatggcgatgggcccgtgggcggcggcctgggcaaagacgtttcgggggtcggacacatcatagttgtggtcctgggtgaggtcatcataggccattttaatgaatttggggcggagggtgccggactgggggacaaaggtaccctcgatcccgggggcgtagttcccctcacagatctgcatctcccaggctttgagctcggagggggggatcatgtccacctgcggggcgataaagaacacggtttccggggcgggggagatgagctgggccgaaagcaagttccggagcagctgggacttgccgcagccggtggggccgtagatgaccccgatgaccggctgcaggtggtagttgagggagagacagctgccgtcctcccggaggaggggggccacctcgttcatcatctcgcgcacgtgcatgttctcgcgcaccagttccgccaggaggcgctctccccccagggataggagctcctggagcgaggcgaagtttttcagcggcttgagtccgtcggccatgggcattttggagagggtttgttgcaagagttccaggcggtcccagagctcggtgatgtgctctacggcatctcgatccagcagacctcctcgtttcgcgggttgggacggctgcgggagtagggcaccagacgatgggcgtccagcgcagccagggtccggtccttccagggtcgcagcgtccgcgtcagggtggtctccgtcacggtgaaggggtgcgcgccgggctgggcgcttgcgagggtgcgcttcaggctcatccggctggtcgaaaaccgctcccgatcggcgccctgcgcgtcggccaggtagcaattgaccatgagttcgtagttgagcgcctcggccgcgtggcctttggcgcggagcttacctttggaagtctgcccgcaggcgggacagaggagggacttgagggcgtagagcttgggggcgaggaagacggactcgggggcgtaggcgtccgcgccgcagtgggcgcagacggtctcgcactccacgagccaggtgaggtcgggctggtcggggtcaaaaaccagtttcccgccgttctttttgatgcgtttcttacctttggtctccatgagctcgtgtccccgctgggtgacaaagaggctgtccgtgtccccgtagaccgactttatgggccggtcctcgagcggtgtgccgcggtcctcctcgtagaggaaccccgcccactccgagacgaaagcccgggtccaggccagcacgaaggaggccacgtgggacgggtagcggtcgttgtccaccagcgggtccaccttttccagggtatgcaaacacatgtccccctcgtccacatccaggaaggtgattggcttgtaagtgtaggccacgtgaccgggggtcccggccgggggggtataaaagggtgcgggtccctgctcgtcctcactgtcttccggatcgctgtccaggagcgccagctgttggggtaggtattccctctcgaaggcgggcatgacctcggcactcaggttgtcagtttctagaaacgaggaggatttgatattgacggtgccggcggagatgcctttcaagagcccctcgtccatctggtcagaaaagacgatctttttgttgtcgagcttggtggcgaaggagccgtagagggcgttggagaggagcttggcgatggagcgcatggtctggtttttttccttgtcggcgcgctccttggcggcgatgttgagctgcacgtactcgcgcgccacgcacttccattcggggaagacggtggtcagctcgtcgggcacgattctgacctgccagccccgattatgcagggtgatgaggtccacactggtggccacctcgccgcgcaggggctcattagtccagcagaggcgtccgcccttgcgcgagcagaaggggggcagggggtccagcatgacctcgtcgggggggtcggcatcgatggtgaagatgccgggcaggaggtcggggtcaaagtagctgatggaagtggccagatcgtccagggcagcttgccattcgcgcacggccagcgcgctctcgtagggactgaggggcgtgccccagggcatgggatgggtaagcgcggaggcgtacatgccgcagatgtcgtagacgtagaggggctcctcgaggatgccgatgtaggtggggtagcagcgccccccgcggatgctggcgcgcacgtagtcatacagctcgtgcgagggggcgaggagccccgggcccaggttggtgcgactgggcttttcggcgcggtagacgatctggcggaaaatggcatgcgagttggaggagatggtgggcctttggaagatgttgaagtgggcgtggggcagtccgaccgagtcgcggatgaagtgggcgtaggagtcttgcagcttggcgacgagctcggcggtgactaggacgtccagagcgcagtagtcgagggtctcctggatgatgtcatacttgagctgtcccttttgtttccacagctcgcggttgagaaggaactcttcgcggtccttccagtactcttcgagggggaacccgtcctgatctgcacggtaagagcctagcatgtagaactggttgacggccttgtaggcgcagcagcccttctccacggggagggcgtaggcctgggcggccttgcgcagggaggtgtgcgtgagggcgaaagtgtccctgaccatgaccttgaggaactggtgcttgaagtcgatatcgtcgcagcccccctgctcccagagctggaagtccgtgcgcttcttgtaggcggggttgggcaaagcgaaagtaacatcgttgaagaggatcttgcccgcgcggggcataaagttgcgagtgatgcggaaaggttggggcacctcggcccggttgttgatgacctgggcggcgagcacgatctcgtcgaagccgttgatgttgtggcccacgatgtagagttccacgaatcgcggacggcccttgacgtggggcagtttcttgagctcctcgtaggtgagctcgtcggggtcgctgagcccgtgctgctcgagcgcccagtcggcgagatgggggttggcgcggaggaaggaagtccagagatccacggccagggcggtttgcagacggtcccggtactgacggaactgctgcccgacggccattttttcgggggtgacgcagtagaaggtgcgggggtccccgtgccagcgatcccatttgagctggagggcgagatcgagggcgagctcgacgagccggtcgtccccggagagtttcatgaccagcatgaaggggacgagctgcttgccgaaggaccccatccaggtgtaggtttccacatcgtaggtgaggaagagcctttcggtgcgaggatgcgagccgatggggaagaactggatctcctgccaccaattggaggaatggctgttgatgtgatggaagtagaaatgccgacggcgcgccgaacactcgtgcttgtgtttatacaagcggccacagtgctcgcaacgctgcacgggatgcacgtgctgcacgagctgtacctgagttcctttgacgaggaatttcagtgggaagtggagtcgtggcgcctgcatctcgtgctgtactacgtcgtggtggtcggcctggccctcttctgcctcgatggtggtcatgctgacgagcccgcgcgggaggcaggtccagacctcggcgcgagcgggtcggagagcgaggacgagggcgcgcaggccggagctgtccagggtcctgagacgctgcggagtcaggtcagtgggcagcggcggcgcgcggttgacttgcaggagtttttccagggcgcgcgggaggtccagatggtacttgatctccaccgcgccattggtggcgacgtcgatggcttgcagggtcccgtgcccctggggtgtgaccaccgtcccccgtttcttcttgggcggctggggcgacgggggcggtgcctcttccatggttagaagcggcggcgaggacgcgcgccgggcggcaggggcggctcggggcccggaggcaggggcggcaggggcacgtcggcgccgcgcgcgggtaggttctggtactgcgcccggagaagactggcgtgagcgacgacgcgacggttgacgtcctggatctgacgcctctgggtgaaggccacgggacccgtgagtttgaacctgaaagagagttcgacagaatcaatctcggtatcgttgacggcggcctgccgcaggatctcttgcacgtcgcccgagttgtcctggtaggcgatctcggtcatgaactgctcgatctcctcctcttgaaggtctccgcggccggcgcgctccacggtggccgcgaggtcgttggagatgcggcccatgagctgcgagaaggcgttcatgcccgcctcgttccagacgcggctgtagaccacgacgccctcgggatcgcgggcgcgcatgaccacctgggcgaggttgagctccacgtggcgcgtgaagaccgcgtagttgcagaggcgctggtagaggtagttgagcgtggtggcgatgtgctcggtgacgaagaaatacatgatccagcggcggagcggcatctcgctgacgtcgcccagcgcctccaaacgttccatggcctcgtaaaagtccacggcgaagttgaaaaactgggagttgcgcgccgagacggtcaactcctcctccagaagacggatgagctcggcgatggtggcgcgcacctcgcgctcgaaggcccccgggagttcctccacttcctcttcttcctcctccactaacatctcttctacttcctcctcaggcggcagtggtggcgggggagggggcctgcgtcgccggcggcgcacgggcagacggtcgatgaagcgctcgatggtctcgccgcgccggcgtcgcatggtctcggtgacggcgcgcccgtcctcgcggggccgcagcgtgaagacgccgccgcgcatctccaggtggccgggggggtccccgttgggcagggagagggcgctgacgatgcatcttatcaattgccccgtagggactccgcgcaaggacctgagcgtctcgagatccacgggatctgaaaaccgctgaacgaaggcttcgagccagtcgcagtcgcaaggtaggctgagcacggtttcttctggcgggtcatgttggttgggagcggggcgggcgatgctgctggtgatgaagttgaaataggcggttctgagacggcggatggtggcgaggagcaccaggtctttgggcccggcttgctggatgcgcagacggtcggccatgccccaggcgtggtcctgacacctggccaggtccttgtagtagtcctgcatgagccgctccacgggcacctcctcctcgcccgcgcggccgtgcatgcgcgtgagcccgaagccgcgctggggctggacgagcgccaggtcggcgacgacgcgctcggcgaggatggcttgctggatctgggtgagggtggtctggaagtcatcaaagtcgacgaagcggtggtaggctccggtgttgatggtgtaggagcagttggccatgacggaccagttgacggtctggtggcccggacgcacgagctcgtggtacttgaggcgcgagtaggcgcgcgtgtcgaagatgtagtcgttgcaggtgcgcaccaggtactggtagccgatgaggaagtgcggcggcggctggcggtagagcggccatcgctcggtggcgggggcgccgggcgcgaggtcctcgagcatggtgcggtggtagccgtagatgtacctggacatccaggtgatgccggcggcggtggtggaggcgcgcgggaactcgcggacgcggttccagatgttgcgcagcggcaggaagtagttcatggtgggcacggtctggcccgtgaggcgcgcgcagtcgtggatgctctatacgggcaaaaacgaaagcggtcagcggctcgactccgtggcctggaggctaagcgaacgggttgggctgcgcgtgtaccccggttcgaatctcgaatcaggctggagccgcagctaacgtggtattggcactcccgtctcgacccaagcctgcaccaaccctccaggatacggaggcgggtcgttttgcaacttttttttggaggccggatgagactagtaagcgcggaaagcggccgaccgcgatggctcgctgccgtagtctggagaagaatcgccagggttgcgttgcggtgtgccccggttcgaggccggccggattccgcggctaacgagggcgtggctgccccgtcgtttccaagaccccatagccagccgacttctccagttacggagcgagcccctcttttgttttgtttgtttttgccagatgcatcccgtactgcggcagatgcgcccccaccaccctccaccgcaacaacagccccctccacagccggcgcttctgcccccgccccagcagcaacttccagccacgaccgccgcggccgccgtgagcggggctggacagagttatgatcaccagctggccttggaagagggcgaggggctggcgcgcctgggggcgtcgtcgccggagcggcacccgcgcgtgcagatgaaaagggacgctcgcgaggcctacgtgcccaagcagaacctgttcagagacaggagcggcgaggagcccgaggagatgcgcgcggcccggttccacgcggggcgggagctgcggcgcggcctggaccgaaagagggtgctgagggacgaggatttcgaggcggacgagctgacggggatcagccccgcgcgcgcgcacgtggccgcggccaacctggtcacggcgtacgagcagaccgtgaaggaggagagcaacttccaaaaatccttcaacaaccacgtgcgcaccctgatcgcgcgcgaggaggtgaccctgggcctgatgcacctgtgggacctgctggaggccatcgtgcagaaccccaccagcaagccgctgacggcgcagctgttcctggtggtgcagcatagtcgggacaacgaagcgttcagggaggcgctgctgaatatcaccgagcccgagggccgctggctcctggacctggtgaacattctgcagagcatcgtggtgcaggagcgcgggctgccgctgtccgagaagctggcggccatcaacttctcggtgctgagtttgggcaagtactacgctaggaagatctacaagaccccgtacgtgcccatagacaaggaggtgaagatcgacgggttttacatgcgcatgaccctgaaagtgctgaccctgagcgacgatctgggggtgtaccgcaacgacaggatgcaccgtgcggtgagcgccagcaggcggcgcgagctgagcgaccaggagctgatgcatagtctgcagcgggccctgaccggggccgggaccgagggggagagctactttgacatgggcgcggacctgcactggcagcccagccgccgggccttggaggcggcggcaggaccctacgtagaagaggtggacgatgaggtggacgaggagggcgagtacctggaagactgatggcgcgaccgtatttttgctagatgcaacaacaacagccacctcctgatcccgcgatgcgggcggcgctgcagagccagccgtccggcattaactcctcggacgattggacccaggccatgcaacgcatcatggcgctgacgacccgcaaccccgaagcctttagacagcagccccaggccaaccggctctcggccatcctggaggccgtggtgccctcgcgctccaaccccacgcacgagaaggtcctggccatcgtgaacgcgctggtggagaacaaggccatccgcggcgacgaggccggcctggtgtacaacgcgctgctggagcgcgtggcccgctacaacagcaccaacgtgcagaccaacctggaccgcatggtgaccgacgtgcgcgaggccgtggcccagcgcgagcggttccaccgcgagtccaacctgggatccatggtggcgctgaacgccttcctcagcacccagcccgccaacgtgccccggggccaggaggactacaccaacttcatcagcgccctgcgcctgatggtgaccgaggtgccccagagcgaggtgtaccagtccgggccggactacttcttccagaccagtcgccagggcttgcagaccgtgaacctgagccaggctttcaagaacttgcagggcctgtggggcgtgcaggccccggtcggggaccgcgcgacggtgtcgagcctgctgacgccgaactcgcgcctgctgctgctgctggtggcccccttcacggacagcggcagcatcaaccgcaactcgtacctgggctacctgattaacctgtaccgcgaggccatcggccaggcgcacgtggacgagcagacctaccaggagatcacccacgtgagccgcgccctgggccaggacgacccgggcaacctggaagccaccctgaactttttgctgaccaaccggtcgcagaagatcccgccccagtacgcgctcagcaccgaggaggagcgcatcctgcgttacgtgcagcagagcgtgggcctgttcctgatgcaggagggggccacccccagcgccgcgctcgacatgaccgcgcgcaacatggagcccagcatgtacgccagcaaccgcccgttcatcaataaactgatggactacttgcatcgggcggccgccatgaactctgactatttcaccaacgccatcctgaatccccactggctcccgccgccggggttctacacgggcgagtacgacatgcccgaccccaatgacgggttcctgtgggacgatgtggacagcagcgtgttctccccccgaccgggtgctaacgagcgccccttgtggaagaaggaaggcagcgaccgacgcccgtcctcggcgctgtccggccgcgagggtgctgccgcggcggtgcccgaggccgccagtcctttcccgagcttgcccttctcgctgaacagtatccgcagcagcgagctgggcaggatcacgcgcccgcgcttgctgggcgaagaggagtacttgaatgactcgctgttgagacccgagcgggagaagaacttccccaataacgggatagaaagcctggtggacaagatgagccgctggaagacgtatgcgcaggagcacagggacgatccccgggcgtcgcagggggccacgagccggggcagcgccgcccgtaaacgccggtggcacgacaggcagcggggacagatgtgggacgatgaggactccgccgacgacagcagcgtgttggacttgggtgggagtggtaacccgttcgctcacctgcgcccccgtatcgggcgcatgatgtaagagaaaccgaaaataaatgatactcaccaaggccatggcgaccagcgtgcgttcgtttcttctctgttgttgttgtatctagtatgatgaggcgtgcgtacccggagggtcctcctccctcgtacgagagcgtgatgcagcaggcgatggcggcggcggcgatgcagcccccgctggaggctccttacgtgcccccgcggtacctggcgcctacggaggggcggaacagcattcgttactcggagctggcacccttgtacgataccacccggttgtacctggtggacaacaagtcggcggacatcgcctcgctgaactaccagaacgaccacagcaacttcctgaccaccgtggtgcagaacaatgacttcacccccacggaggccagcacccagaccatcaactttgacgagcgctcgcggtggggcggccagctgaaaaccatcatgcacaccaacatgcccaacgtgaacgagttcatgtacagcaacaagttcaaggcgcgggtgatggtctcccgcaagacccccaatggggtgacagtgacagaggattatgatggtagtcaggatgagctgaagtatgaatgggtggaatttgagctgcccgaaggcaacttctcggtgaccatgaccatcgacctgatgaacaacgccatcatcgacaattacttggcggtggggcggcagaacggggtgctggagagcgacatcggcgtgaagttcgacactaggaacttcaggctgggctgggaccccgtgaccgagctggtcatgcccggggtgtacaccaacgaggctttccatcccgatattgtcttgctgcccggctgcggggtggacttcaccgagagccgcctcagcaacctgctgggcattcgcaagaggcagcccttccaggaaggcttccagatcatgtacgaggatctggaggggggcaacatccccgcgctcctggatgtcgacgcctatgagaaaagcaaggaggatgcagcagctgaagcaactgcagccgtagctaccgcctctaccgaggtcaggggcgataattttgcaagcgccgcagcagtggcagcggccgaggcggctgaaaccgaaagtaagatagtcattcagccggtggagaaggatagcaagaacaggagctacaacgtactaccggacaagataaacaccgcctaccgcagctggtacctagcctacaactatggcgaccccgagaagggcgtgcgctcctggacgctgctcaccacctcggacgtcacctgcggcgtggagcaagtctactggtcgctgcccgacatgatgcaagacccggtcaccttccgctccacgcgtcaagttagcaactacccggtggtgggcgccgagctcctgcccgtctactccaagagcttcttcaacgagcaggccgtctactcgcagcagctgcgcgccttcacctcgcttacgcacgtcttcaaccgcttccccgagaaccagatcctcgtccgcccgcccgcgcccaccattaccaccgtcagtgaaaacgttcctgctctcacagatcacgggaccctgccgctgcgcagcagtatccggggagtccagcgcgtgaccgttactgacgccagacgccgcacctgcccctacgtctacaaggccctgggcatagtcgcgccgcgcgtcctctcgagccgcaccttctaaatgtccattctcatctcgcccagtaataacaccggttggggcctgcgcgcgcccagcaagatgtacggaggcgctcgccaacgctccacgcaacaccccgtgcgcgtgcgcgggcacttccgcgctccctggggcgccctcaagggccgcgtgcggtcgcgcaccaccgtcgacgacgtgatcgaccaggtggtggccgacgcgcgcaactacacccccgccgccgcgcccgtctccaccgtggacgccgtcatcgacagcgtggtggccgacgcgcgccggtacgcccgcgccaagagccggcggcggcgcatcgcccggcggcaccggagcacccccgccatgcgcgcggcgcgagccttgctgcgcagggccaggcgcacgggacgcagggccatgctcagggcggccagacgcgcggcttcaggcgccagcgccggcaggacccggagacgcgcggccacggcggcggcagcggccatcgccagcatgtcccgcccgcggcgagggaacgtgtactgggtgcgcgacgccgccaccggtgtgcgcgtgcccgtgcgcacccgcccccctcgcacttgaagatgttcacttcgcgatgttgatgtgtcccagcggcgaggaggatgtccaagcgcaaattcaaggaagagatgctccaggtcatcgcgcctgagatctacggccctgcggtggtgaaggaggaaagaaagccccgcaaaatcaagcgggtcaaaaaggacaaaaaggaagaagaaagtgatgtggacggattggtggagtttgtgcgcgagttcgccccccggcggcgcgtgcagtggcgcgggcggaaggtgcaaccggtgctgagacccggcaccaccgtggtcttcacgcccggcgagcgctccggcaccgcttccaagcgctcctacgacgaggtgtacggggatgatgatattctggagcaggcggccgagcgcctgggcgagtttgcttacggcaagcgcagccgttccgcaccgaaggaagaggcggtgtccatcccgctggaccacggcaaccccacgccgagcctcaagcccgtgaccttgcagcaggtgctgccgaccgcggcgccgcgccgggggttcaagcgcgagggcgaggatctgtaccccaccatgcagctgatggtgcccaagcgccagaagctggaagacgtgctggagaccatgaaggtggacccggacgtgcagcccgaggtcaaggtgcggcccatcaagcaggtggccccgggcctgggcgtgcagaccgtggacatcaagattcccacggagcccatggaaacgcagaccgagcccatgatcaagcccagcaccagcaccatggaggtgcagacggatccctggatgccatcggctcctagtcgaagaccccggcgcaagtacggcgcggccagcctgctgatgcccaactacgcgctgcatccttccatcatccccacgccgggctaccgcggcacgcgcttctaccgcggtcataccagcagccgccgccgcaagaccaccactcgccgccgccgtcgccgcaccgccgctgcaaccacccctgccgccctggtgcggagagtgtaccgccgcggccgcgcacctctgaccctgccgcgcgcgcgctaccacccgagcatcgccatttaaactttcgcctgctttgcagatcaatggccctcacatgccgccttcgcgttcccattacgggctaccgaggaagaaaaccgcgccgtagaaggctggcggggaacgggatgcgtcgccaccaccaccggcggcggcgcgccatcagcaagcggttggggggaggcttcctgcccgcgctgatccccatcatcgccgcggcgatcggggcgatccccggcattgcttccgtggcggtgcaggcctctcagcgccactgagacacacttggaaacatcttgtaataaaccaatggactctgacgctcctggtcctgtgatgtgttttcgtagacagatggaagacatcaatttttcgtccctggctccgcgacacggcacgcggccgttcatgggcacctggagcgacatcggcaccagccaactgaacgggggcgccttcaattggagcagtctctggagcgggcttaagaatttcgggtccacgcttaaaacctatggcagcaaggcgtggaacagcaccacagggcaggcgctgagggataagctgaaagagcagaacttccagcagaaggtggtcgatgggctcgcctcgggcatcaacggggtggtggacctggccaaccaggccgtgcagcggcagatcaacagccgcctggacccggtgccgcccgccggctccgtggagatgccgcaggtggaggaggagctgcctcccctggacaagcggggcgagaagcgaccccgccccgatgcggaggagacgctgctgacgcacacggacgagccgcccccgtacgaggaggcggtgaaactgggtctgcccaccacgcggcccatcgcgcccctggccaccggggtgctgaaacccgaaaagcccgcgaccctggacttgcctcctccccagccttcccgcccctctacagtggctaagcccctgccgccggtggccgtggcccgcgcgcgacccgggggcaccgcccgccctcatgcgaactggcagagcactctgaacagcatcgtgggtctgggagtgcagagtgtgaagcgccgccgctgctattaaacctaccgtagcgcttaacttgcttgtctgtgtgtgtatgtattatgtcgccgccgccgctgtccaccagaaggaggagtgaagaggcgcgtcgccgagttgcaagatggccaccccatcgatgctgccccagtgggcgtacatgcacatcgccggacaggacgcttcggagtacctgagtccgggtctggtgcagtttgcccgcgccacagacacctacttcagtctggggaacaagtttaggaaccccacggtggcgcccacgcacgatgtgaccaccgaccgcagccagcggctgacgctgcgcttcgtgcccgtggaccgcgaggacaacacctactcgtacaaagtgcgctacacgctggccgtgggcgacaaccgcgtgctggacatggccagcacctactttgacatccgcggcgtgctggatcggggccctagcttcaaaccctactccggcaccgcctacaacagtctggcccccaagggagcacccaacacttgtcagtggacatataaagccgatggtgaaactgccacagaaaaaacctatacatatggaaatgcacccgtgcagggcattaacatcacaaaagatggtattcaacttggaactgacaccgatgatcagccaatctacgcagataaaacctatcagcctgaacctcaagtgggtgatgctgaatggcatgacatcactggtactgatgaaaagtatggaggcagagctcttaagcctgataccaaaatgaagccttgttatggttcttttgccaagcctactaataaagaaggaggtcaggcaaatgtgaaaacaggaacaggcactactaaagaatatgacatagacatggctttctttgacaacagaagtgcggctgctgctggcctagctccagaaattgttttgtatactgaaaatgtggatttggaaactccagatacccatattgtatacaaagcaggcacagatgacagcagctcttctattaatttgggtcagcaagccatgcccaacagacctaactacattggtttcagagacaactttatcgggctcatgtactacaacagcactggcaatatgggggtgctggccggtcaggcttctcagctgaatgctgtggttgacttgcaagacagaaacaccgagctgtcctaccagctcttgcttgactctctgggtgacagaacccggtatttcagtatgtggaatcaggcggtggacagctatgatcctgatgtgcgcattattgaaaatcatggtgtggaggatgaacttcccaactattgtttccctctggatgctgttggcagaacagatacttatcagggaattaaggctaatggaactgatcaaaccacatggaccaaagatgacagtgtcaatgatgctaatgagataggcaagggtaatccattcgccatggaaatcaacatccaagccaacctgtggaggaacttcctctacgccaacgtggccctgtacctgcccgactcttacaagtacacgccggccaatgttaccctgcccaccaacaccaacacctacgattacatgaacggccgggtggtggcgccctcgctggtggactcctacatcaacatcggggcgcgctggtcgctggatcccatggacaacgtgaaccccttcaaccaccaccgcaatgcggggctgcgctaccgctccatgctcctgggcaacgggcgctacgtgcccttccacatccaggtgccccagaaatttttcgccatcaagagcctcctgctcctgcccgggtcctacacctacgagtggaacttccgcaaggacgtcaacatgatcctgcagagctccctcggcaacgacctgcgcacggacggggcctccatctccttcaccagcatcaacctctacgccaccttcttccccatggcgcacaacacggcctccacgctcgaggccatgctgcgcaacgacaccaacgaccagtccttcaacgactacctctcggcggccaacatgctctaccccatcccggccaacgccaccaacgtgcccatctccatcccctcgcgcaactgggccgccttccgcggctggtccttcacgcgtctcaagaccaaggagacgccctcgctgggctccgggttcgacccctacttcgtctactcgggctccatcccctacctcgacggcaccttctacctcaaccacaccttcaagaaggtctccatcaccttcgactcctccgtcagctggcccggcaacgaccggctcctgacgcccaacgagttcgaaatcaagcgcaccgtcgacggcgagggctacaacgtggcccagtgcaacatgaccaaggactggttcctggtccagatgctggcccactacaacatcggctaccagggcttctacgtgcccgagggctacaaggaccgcatgtactccttcttccgcaacttccagcccatgagccgccaggtggtggacgaggtcaactacaaggactaccaggccgtcaccctggcctaccagcacaacaactcgggcttcgtcggctacctcgcgcccaccatgcgccagggccagccctaccccgccaactacccctacccgctcatcggcaagagcgccgtcaccagcgtcacccagaaaaagttcctctgcgacagggtcatgtggcgcatccccttctccagcaacttcatgtccatgggcgcgctcaccgacctcggccagaacatgctctatgccaactccgcccacgcgctagacatgaatttcgaagtcgaccccatggatgagtccacccttctctatgttgtcttcgaagtcttcgacgtcgtccgagtgcaccagccccaccgcggcgtcatcgaggccgtctacctgcgcacccccttctcggccggtaacgccaccacctaagctcttgcttcttgcaagccatggccgcgggctccggcgagcaggagctcagggccatcatccgcgacctgggctgcgggccctacttcctgggcaccttcgataagcgcttcccgggattcatggccccgcacaagctggcctgcgccatcgtcaacacggccggccgcgagaccgggggcgagcactggctggccttcgcctggaacccgcgctcgaacacctgctacctcttcgaccccttcgggttctcggacgagcgcctcaagcagatctaccagttcgagtacgagggcctgctgcgccgcagcgccctggccaccgaggaccgctgcgtcaccctggaaaagtccacccagaccgtgcagggtccgcgctcggccgcctgcgggctcttctgctgcatgttcctgcacgccttcgtgcactggcccgaccgccccatggacaagaaccccaccatgaacttgctgacgggggtgcccaacggcatgctccagtcgccccaggtggaacccaccctgcgccgcaaccaggaggcgctctaccgcttcctcaactcccactccgcctactttcgctcccaccgcgcgcgcatcgagaaggccaccgccttcgaccgcatgaatcaagacatgtaaaccgtgtgtgtatgttaaatgtctttaataaacagcactttcatgttacacatgcatctgagatgatttatttagaaatcgaaagggttctgccgggtctcggcatggcccgcgggcagggacacgttgcggaactggtacttggccagccacttgaactcggggatcagcagtttgggcagcggggtgtcggggaaggagtcggtccacagcttccgcgtcagttgcagggcgcccagcaggtcgggcgcggagatcttgaaatcgcagttgggacccgcgttctgcgcgcgggagttgcggtacacggggttgcagcactggaacaccatcagggccgggtgcttcacgctcgccagcaccgtcgcgtcggtgatgctctccacgtcgaggtcctcggcgttggccatcccgaagggggtcatcttgcaggtctgccttcccatggtgggcacgcacccgggcttgtggttgcaatcgcagtgcagggggatcagcatcatctgggcctggtcggcgttcatccccgggtacatggccttcatgaaagcctccaattgcctgaacgcctgctgggccttggctccctcggtgaagaagaccccgcaggacttgctagagaactggttggtggcgcacccggcgtcgtgcacgcagcagcgcgcgtcgttgttggccagctgcaccacgctgcgcccccagcggttctgggtgatcttggcccggtcggggttctccttcagcgcgcgctgcccgttctcgctcgccacatccatctcgatcatgtgctccttctggatcatggtggtcccgtgcaggcaccgcagcttgccctcggcctcggtgcacccgtgcagccacagcgcgcacccggtgcactcccagttcttgtgggcgatctgggaatgcgcgtgcacgaagccctgcaggaagcggcccatcatggtggtcagggtcttgttgctagtgaaggtcagcggaatgccgcggtgctcctcgttgatgtacaggtggcagatgcggcggtacacctcgccctgctcgggcatcagctggaagttggctttcaggtcggtctccacgcggtagcggtccatcagcatagtcatgatttccatacccttctcccaggccgagacgatgggcaggctcatagggttcttcaccatcatcttagcgctagcagccgcggccagggggtcgctctcgtccagggtctcaaagctccgcttgccgtccttctcggtgatccgcaccggggggtagctgaagcccacggccgccagctcctcctcggcctgtctttcgtcctcgctgtcctggctgacgtcctgcaggaccacatgcttggtcttgcggggtttcttcttgggcggcagcggcggcggagatgttggagatggcgagggggagcgcgagttctcgctcaccactactatctcttcctcttcttggtccgaggccacgcggcggtaggtatgtctcttcgggggcagaggcggaggcgacgggctctcgccgccgcgacttggcggatggctggcagagccccttccgcgttcgggggtgcgctcccggcggcgctctgactgacttcctccgcggccggccattgtgttctcctagggaggaacaacaagcatggagactcagccatcgccaacctcgccatctgcccccaccgccgacgagaagcagcagcagcagaatgaaagcttaaccgccccgccgcccagccccgccacctccgacgcggccgtcccagacatgcaagagatggaggaatccatcgagattgacctgggctatgtgacgcccgcggagcacgaggaggagctggcagtgcgcttttcacaagaagagatacaccaagaacagccagagcaggaagcagagaatgagcagagtcaggctgggctcgagcatgacggcgactacctccacctgagcgggggggaggacgcgctcatcaagcatctggcccggcaggccaccatcgtcaaggatgcgctgctcgaccgcaccgaggtgcccctcagcgtggaggagctcagccgcgcctacgagttgaacctcttctcgccgcgcgtgccccccaagcgccagcccaatggcacctgcgagcccaacccgcgcctcaacttctacccggtcttcgcggtgcccgaggccctggccacctaccacatctttttcaagaaccaaaagatccccgtctcctgccgcgccaaccgcacccgcgccgacgcccttttcaacctgggtcccggcgcccgcctacctgatatcgcctccttggaagaggttcccaagatcttcgagggtctgggcagcgacgagactcgggccgcgaacgctctgcaaggagaaggaggagagcatgagcaccacagcgccctggtcgagttggaaggcgacaacgcgcggctggcggtgctcaaacgcacggtcgagctgacccatttcgcctacccggctctgaacctgccccccaaagtcatgagcgcggtcatggaccaggtgctcatcaagcgcgcgtcgcccatctccgaggacgagggcatgcaagactccgaggagggcaagcccgtggtcagcgacgagcagctggcccggtggctgggtcctaatgctagtccccagagtttggaagagcggcgcaaactcatgatggccgtggtcctggtgaccgtggagctggagtgcctgcgccgcttcttcgccgacgcggagaccctgcgcaaggtcgaggagaacctgcactacctcttcaggcacgggttcgtgcgccaggcctgcaagatctccaacgtggagctgaccaacctggtctcctacatgggcatcttgcacgagaaccgcctggggcagaacgtgctgcacaccaccctgcgcggggaggcccggcgcgactacatccgcgactgcgtctacctctacctctgccacacctggcagacgggcatgggcgtgtggcagcagtgtctggaggagcagaacctgaaagagctctgcaagctcctgcagaagaacctcaagggtctgtggaccgggttcgacgagcgcaccaccgcctcggacctggccgacctcattttccccgagcgcctcaggctgacgctgcgcaacggcctgcccgactttatgagccaaagcatgttgcaaaactttcgctctttcatcctcgaacgctccggaatcctgcccgccacctgctccgcgctgccctcggacttcgtgccgctgaccttccgcgagtgccccccgccgctgtggagccactgctacctgctgcgcctggccaactacctggcctaccactcggacgtgatcgaggacgtcagcggcgagggcctgctcgagtgccactgccgctgcaacctctgcacgccgcaccgctccctggcctgcaacccccagctgctgagcgagacccagatcatcggcaccttcgagttgcaagggcccagcgaaggcgagggttcagccgccaaggggggtctgaaactcaccccggggctgtggacctcggcctacttgcgcaagttcgtgcccgaggactaccatcccttcgagatcaggttctacgaggaccaatcccatccgcccaaggccgagctgtcggcctgcgtcatcacccagggggcgatcctggcccaattgcaagccatccagaaatcccgccaagaattcttgctgaaaaagggccgcggggtctacctcgacccccagaccggtgaggagctcaaccccggcttcccccaggatgccccgaggaaacaagaagctgaaagtggagctgccgcccgtggaggatttggaggaagactgggagaacagcagtcaggcagaggaggaggagatggaggaagactgggacagcactcaggcagaggaggacagcctgcaagacagtctggaggaagacgaggaggaggcagaggaggaggtggaagaagcagccgccgccagaccgtcgtcctcggcgggggagaaagcaagcagcacggataccatctccgctccgggtcggggtcccgctcgaccacacagtagatgggacgagaccggacgattcccgaaccccaccacccagaccggtaagaaggagcggcagggatacaagtcctggcgggggcacaaaaacgccatcgtctcctgcttgcaggcctgcgggggcaacatctccttcacccggcgctacctgctcttccaccgcggggtgaactttccccgcaacatcttgcattactaccgtcacctccacagcccctactacttccaagaagaggcagcagcagcagaaaaagaccagcagaaaaccagcagctagaaaatccacagcggcggcagcaggtggactgaggatcgcggcgaacgagccggcgcaaacccgggagctgaggaaccggatctttcccaccctctatgccatcttccagcagagtcgggggcaggagcaggaactgaaagtcaagaaccgttctctgcgctcgctcacccgcagttgtctgtatcacaagagcgaagaccaacttcagcgcactctcgaggacgccgaggctctcttcaacaagtactgcgcgctcactcttaaagagtagcccgcgcccgcccagtcgcagaaaaaggcgggaattacgtcacctgtgcccttcgccctagccgcctccacccatcatcatgagcaaagagattcccacgccttacatgtggagctaccagccccagatgggcctggccgccggtgccgcccaggactactccacccgcatgaattggctcagcgccgggcccgcgatgatctcacgggtgaatgacatccgcgcccaccgaaaccagatactcctagaacagtcagcgctcaccgccacgccccgcaatcacctcaatccgcgtaattggcccgccgccctggtgtaccaggaaattccccagcccacgaccgtactacttccgcgagacgcccaggccgaagtccagctgactaactcaggtgtccagctggcgggcggcgccaccctgtgtcgtcaccgccccgctcagggtataaagcggctggtgatccggggcagaggcacacagctcaacgacgaggtggtgagctcttcgctgggtctgcgacctgacggagtcttccaactcgccggatcggggagatcttccttcacgcctcgtcaggccgtcctgactttggagagttcgtcctcgcagccccgctcgggtggcatcggcactctccagttcgtggaggagttcactccctcggtctacttcaaccccttctccggctcccccggccactacccggacgagttcatcccgaacttcgacgccatcagcgagtcggtggacggctacgattgaatgtcccatggtggcgcagctgacctagctcggcttcgacacctggaccactgccgccgcttccgctgcttcgctcgggatctcgccgagtttgcctactttgagctgcccgaggagcaccctcagggcccggcccacggagtgcggatcgtcgtcgaagggggcctcgactcccacctgcttcggatcttcagccagcgtccgatcctggtcgagcgcgagcaaggacagacccttctgactctgtactgcatctgcaaccaccccggcctgcatgaaagtctttgttgtctgctgtgtactgagtataataaaagctgagatcagcgactactccggacttccgtgtgttcctgaatccatcaaccagtctttgttcttcaccgggaacgagaccgagctccagctccagtgtaagccccacaagaagtacctcacctggctgttccagggctccccgatcgccgttgtcaaccactgcgacaacgacggagtcctgctgagcggccctgccaaccttactttttccacccgcagaagcaagctccagctcttccaacccttcctccccgggacctatcagtgcgtctcgggaccctgccatcacaccttccacctgatcccgaataccacagcgtcgctccccgctactaacaaccaaactaacctccaccaacgccaccgtcgcgacggccacaatacatgcccatattagactatgaggccgagccacagcgacccatgctccccgctattagttacttcaatctaaccggcggagatgactgacccactggccaacaacaacgtcaacgaccttctcctggacatggacggccgcgcctcggagcagcgactcgcccaacttcgcattcgccagcagcaggagagagccgtcaaggagctgcaggatgcggtggccatccaccagtgcaagagaggcatcttctgcctggtgaaacaggccaagatctcctacgaggtcactccaaacgaccatcgcctctcctacgagctcctgcagcagcgccagaagttcacctgcctggtcggagtcaaccccatcgtcatcacccagcagtctggcgataccaaggggtgcatccactgctcctgcgactcccccgactgcgtccacactctgatcaagaccctctgcggcctccgcgacctcctccccatgaactaatcacccccttatccagtgaaataaagatcatattgatgatgattttacagaaataaaaaataatcatttgatttgaaataaagatacaatcatattgatgatttgagtttaacaaaaaaataaagaatcacttacttgaaatctgataccaggtctctgtccatgttttctgccaacaccacttcactcccctcttcccagctctggtactgcaggccccggcgggctgcaaacttcctccacacgctgaaggggatgtcaaattcctcctgtccctcaatcttcattttatcttctatcagatgtccaaaaagcgcgtccgggtggatgatgacttcgaccccgtctacccctacgatgcagacaacgcaccgaccgtgcccttcatcaacccccccttcgtctcttcagatggattccaagagaagcccctgggggtgttgtccctgcgactggccgaccccgtcaccaccaagaacggggaaatcaccctcaagctgggagagggggtggacctcgattcctcgggaaaactcatctccaacacggccaccaaggccgccgcccctctcagtttttccaacaacaccatttcccttaacatggatcaccccttttacactaaagatggaaaattatccttacaagtttctccaccattaaatatactgagaacaagcattctaaacacactagctttaggttttggatcaggtttaggactccgtggctctgccttggcagtacagttagtctctccacttacatttgatactgatggaaacataaagcttaccttagacagaggtttgcatgttacaacaggagatgcaattgaaagcaacataagctgggctaaaggtttaaaatttgaagatggagccatagcaaccaacattggaaatgggttagagtttggaagcagtagtacagaaacaggtgttgatgatgcttacccaatccaagttaaacttggatctggccttagctttgacagtacaggagccataatggctggtaacaaagaagacgataaactcactttgtggacaacacctgatccatcaccaaactgtcaaatactcgcagaaaatgatgcaaaactaacactttgcttgactaaatgtggtagtcaaatactggccactgtgtcagtcttagttgtaggaagtggaaacctaaaccccattactggcaccgtaagcagtgctcaggtgtttctacgttttgatgcaaacggtgttcttttaacagaacattctacactaaaaaaatactgggggtataggcagggagatagcatagatggcactccatataccaatgctgtaggattcatgcccaatttaaaagcttatccaaagtcacaaagttctactactaaaaataatatagtagggcaagtatacatgaatggagatgtttcaaaacctatgcttctcactataaccctcaatggtactgatgacagcaacagtacatattcaatgtcattttcatacacctggactaatggaagctatgttggagcaacatttggggctaactcttataccttctcatacatcgcccaagaatgaacactgtatcccaccctgcatgccaacccttcccaccccactctgtggaacaaactctgaaacacaaaataaaataaagttcaagtgttttattgattcaacagttttacaggattcgagcagttatttttcctccaccctcccaggacatggaatacaccaccctctccccccgcacagccttgaacatctgaatgccattggtgatggacatgcttttggtctccacgttccacacagtttcagagcgagccagtctcgggtcggtcagggagatgaaaccctccgggcactcccgcatctgcacctcacagctcaacagctgaggattgtcctcggtggtcgggatcacggttatctggaagaagcagaagagcggcggtgggaatcatagtccgcgaacgggatcggccggtggtgtcgcatcaggccccgcagcagtcgctgccgccgccgctccgtcaagctgctgctcagggggtccgggtccagggactccctcagcatgatgcccacggccctcagcatcagtcgtctggtgcggcgggcgcagcagcgcatgcggatctcgctcaggtcgctgcagtacgtgcaacacagaaccaccaggttgttcaacagtccatagttcaacacgctccagccgaaactcatcgcgggaaggatgctacccacgtggccgtcgtaccagatcctcaggtaaatcaagtggtgccccctccagaacacgctgcccacgtacatgatctccttgggcatgtggcggttcaccacctcccggtaccacatcaccctctggttgaacatgcagccccggatgatcctgcggaaccacagggccagcaccgccccgcccgccatgcagcgaagagaccccgggtcccggcaatggcaatggaggacccaccgctcgtacccgtggatcatctgggagctgaacaagtctatgttggcacagcacaggcatatgctcatgcatctcttcagcactctcaactcctcgggggtcaaaaccatatcccagggcacggggaactcttgcaggacagcgaaccccgcagaacagggcaatcctcgcacagaacttacattgtgcatggacagggtatcgcaatcaggcagcaccgggtgatcctccaccagagaagcgcgggtctcggtctcctcacagcgtggtaagggggccggccgatacgggtgatggcgggacgcggctgatcgtgttcgcgaccgtgtcatgatgcagttgctttcggacattttcgtacttgctgtagcagaacctggtccgggcgctgcacaccgatcgccggcggcggtctcggcgcttggaacgctcggtgttgaaattgtaaaacagccactctctcagaccgtgcagcagatctagggcctcaggagtgatgaagatcccatcatgcctgatggctctgatcacatcgaccaccgtggaatgggccagacccagccagatgatgcaattttgttgggtttcggtgacggcgggggagggaagaacaggaagaaccatgattaacttttaatccaaacggtctcggagtacttcaaaatgaagatcgcggagatggcacctctcgcccccgctgtgttggtggaaaataacagccaggtcaaaggtgatacggttctcgagatgttccacggtggcttccagcaaagcctccacgcgcacatccagaaacaagacaatagcgaaagcgggagggttctctaattcctcaatcatcatgttacactcctgcaccatccccagataattttcatttttccagccttgaatgattcgaactagttcgtgaggtaaatccaagccagccatgataaagagctcgcgcagagcgccctccaccggcattcttaagcacaccctcataattccaagatattctgctcctggttcacctgcagcagattgacaagcggaatatcaaaatctctgccgcgatccctgagctcctccctcagcaataactgtaagtactctttcatatcctctccgaaatttttagccataggaccaccaggaataagattagggcaagccacagtacagataaaccgaagtcctccccagtgagcattgccaaatgcaagactgctataagcatgctggctagacccggtgatatcttccagataactggacagaaaatcgcccaggcaatttttaagaaaatcaacaaaagaaaaatcctccaggtggacgtttagagcctcgggaacaacgatgaagtaaatgcaagcggtgcgttccagcatggttagttagctgatctgtagaaaaaacaaaaatgaacattaaaccatgctagcctggcgaacaggtgggtaaatcgttctctccagcaccaggcaggccacggggtctccggcgcgaccctcgtaaaaattgtcgctatgattgaaaaccatcacagagagacgttcccggtggccggcgtgaatgattcgacaagatgaatacacccccggaacattggcgtccgcgagtgaaaaaaagcgcccgaggaagcaataaggcactacaatgctcagtctcaagtccagcaaagcgatgccatgcggatgaagcacaaaattctcaggtgcgtacaaaatgtaattactcccctcctgcacaggcagcaaagcccccgatccctccaggtacacatacaaagcctcagcgtccatagcttaccgagcagcagcacacaacaggcgcaagagtcagagaaaggctgagctctaacctgtccacccgctctctgctcaatatatagcccagatctacactgacgtaaaggccaaagtctaaaaatacccgccaaataatcacacacgcccagcacacgcccagaaaccggtgacacactcaaaaaaatacgcgcacttcctcaaacgcccaaaactgccgtcatttccgggttcccacgctacgtcatcaaaacacgactttcaaattccgtcgaccgttaaaaacgtcacccgccccgcccctaacggtcgcccgtctctcagccaatcagcgccccgcatccccaaattcaaacacctcatttgcatattaacgcgcacaaaaagtttgaggtatattattgatgatgg

SEQ ID NO: 12 - DNA, 32788 bp, Artificial Sequence
  Description of Artificial Sequence: Synthetic polynucleotide
ccatcttcaataatatacctcaaactttttgtgcgcgttaatatgcaaatgaggcgtttgaatttggggaggaagggcggtgattggtcgagggatgagcgaccgttaggggcggggcgagtgacgttttgatgacgtggttgcgaggaggagccagtttgcaagttctcgtgggaaaagtgacgtcaaacgaggtgtggtttgaacacggaaatactcaattttcccgcgctctctgacaggaaatgaggtgtttctgggcggatgcaagtgaaaacgggccattttcgcgcgaaaactgaatgaggaagtgaaaatctgagtaatttcgcgtttatggcagggaggagtatttgccgagggccgagtagactttgaccgattacgtgggggtttcgattaccgtgtttttcacctaaatttccgcgtacggtgtcaaagtccggtgtttttacgtaggtgtcagctgatcgccagggtatttaaacctgcgctctccagtcaagaggccactcttgagtgccagcgagaagagttttctcctccgcgccgcgagtcagatctacactttgaaagtagggataacagggtaatgacattgattattgactagttgttaatagtaatcaattacggggtcattagttcatagcccatatatggagttccgcgttacataacttacggtaaatggcccgcctggctgaccgcccaacgacccccgcccattgacgtcaataatgacgtatgttcccatagtaacgccaatagggactttccattgacgtcaatgggtggagtatttacggtaaactgcccacttggcagtacatcaagtgtatcatatgccaagtccgccccctattgacgtcaatgacggtaaatggcccgcctggcattatgcccagtacatgaccttacgggactttcctacttggcagtacatctacgtattagtcatcgctattaccatggtgatgcggttttggcagtacaccaatgggcgtggatagcggtttgactcacggggatttccaagtctccaccccattgacgtcaatgggagtttgttttggcaccaaaatcaacgggactttccaaaatgtcgtaataaccccgccccgttgacgcaaatgggcggtaggcgtgtacggtgggaggtctatataagcagagctcgtttagtgaaccgtcagatcgcctggaacgccatccacgctgttttgacctccatagaagacagcgatcgcgccaccatggccgggatgttccaggcactgtccgaaggctgcacaccctatgatattaaccagatgctgaatgtcctgggagaccaccaggtctctggcctggagcagctggagagcatcatcaacttcgagaagctgaccgagtggacaagctccaatgtgatgcctatcctgtccccactgaccaagggcatcctgggcttcgtgtttaccctgacagtgccttctgagcggggcctgtcttgcatcagcgaggcagacgcaaccacaccagagtccgccaatctgggcgaggagatcctgtctcagctgtacctgtggccccgggtgacatatcactccccttcttacgcctatcaccagttcgagcggagagccaagtacaagagacacttcccaggctttggccagtctctgctgttcggctaccccgtgtacgtgttcggcgattgcgtgcagggcgactgggatgccatccggtttagatactgcgcaccacctggatatgcactgctgaggtgtaacgacaccaattattccgccctgctggcagtgggcgccctggagggccctcgcaatcaggattggctgggcgtgccaaggcagctggtgacacgcatgcaggccatccagaacgcaggcctgtgcaccctggtggcaatgctggaggagacaatcttctggctgcaggcctttctgatggccctgaccgacagcggccccaagacaaacatcatcgtggattcccagtacgtgatgggcatctccaagccttctttccaggagtttgtggactgggagaacgtgagcccagagctgaattccaccgatcagccattctggcaggcaggaatcctggcaaggaacctggtgcctatggtggccacagtgcagggccagaatctgaagtaccagggccagagcctggtcatcagcgcctccatcatcgtgtttaacctgctggagctggagggcgactatcgggacgatggcaacgtgtgggtgcacaccccactgagccccagaacactgaacgcctgggtgaaggccgtggaggagaagaagggcatcccagtgcacctggagctggcctccatgaccaatatggagctgatgtctagcatcgtgcaccagcaggtgaggacatacggacccgtgttcatgtgcctgggaggcctgctgaccatggtggcaggagccgtgtggctgacagtgcgggtgctggagctgttcagagccgcccagctggccaacgatgtggtgctgcagatcatggagctgtgcggagcagcctttcgccaggtgtgccacaccacagtgccatggcccaatgcctccctgacccccaagtggaacaatgagacaacacagcctcagatcgccaactgtagcgtgtacgacttcttcgtgtggctgcactactatagcgtgagggataccctgtggccccgcgtgacataccacatgaataagtacgcctatcacatgctggagaggcgcgccaagtataagagaggccctggcccaggcgcaaagtttgtggcagcatggaccctgaaggccgccgccggccccggccccggccagtatatcaaggctaacagtaagttcattggaatcacagagctgggacccggacctggataatgagtttaaactcccatttaaatgtgagggttaatgcttcgagcagacatgataagatacattgatgagtttggacaaaccacaactagaatgcagtgaaaaaaatgctttatttgtgaaatttgtgatgctattgctttatttgtaaccattataagctgcaataaacaagttaacaacaacaattgcattcattttatgtttcaggttcagggggagatgtgggaggttttttaaagcaagtaaaacctctacaaatgtggtaaaataactataacggtcctaaggtagcgagtgagtagtgttctggggcgggggaggacctgcatgagggccagaataactgaaatctgtgcttttctgtgtgttgcagcagcatgagcggaagcggctcctttgagggaggggtattcagcccttatctgacggggcgtctcccctcctgggcgggagtgcgtcagaatgtgatgggatccacggtggacggccggcccgtgcagcccgcgaactcttcaaccctgacctatgcaaccctgagctcttcgtcgttggacgcagctgccgccgcagctgctgcatctgccgccagcgccgtgcgcggaatggccatgggcgccggctactacggcactctggtggccaactcgagttccaccaataatcccgccagcctgaacgaggagaagctgttgctgctgatggcccagctcgaggccttgacccagcgcctgggcgagctgacccagcaggtggctcagctgcaggagcagacgcgggccgcggttgccacggtgaaatccaaataaaaaatgaatcaataaataaacggagacggttgttgattttaacacagagtctgaatctttatttgatttttcgcgcgcggtaggccctggaccaccggtctcgatcattgagcacccggtggatcttttccaggacccggtagaggtgggcttggatgttgaggtacatgggcatgagcccgtcccgggggtggaggtagctccattgcagggcctcgtgctcgggggtggtgttgtaaatcacccagtcatagcaggggcgcagggcatggtgttgcacaatatctttgaggaggagactgatggccacgggcagccctttggtgtaggtgtttacaaatctgttgagctgggagggatgcatgcggggggagatgaggtgcatcttggcctggatcttgagattggcgatgttaccgcccagatcccgcctggggttcatgttgtgcaggaccaccagcacggtgtatccggtgcacttggggaatttatcatgcaacttggaagggaaggcgtgaaagaatttggcgacgcctttgtgcccgcccaggttttccatgcactcatccatgatgatggcgatgggcccgtgggcggcggcctgggcaaagacgtttcgggggtcggacacatcatagttgtggtcctgggtgaggtcatcataggccattttaatgaatttggggcggagggtgccggactgggggacaaaggtaccctcgatcccgggggcgtagttcccctcacagatctgcatctcccaggctttgagctcggagggggggatcatgtccacctgcggggcgataaagaacacggtttccggggcgggggagatgagctgggccgaaagcaagttccggagcagctgggacttgccgcagccggtggggccgtagatgaccccgatgaccggctgcaggtggtagttgagggagagacagctgccgtcctcccggaggaggggggccacctcgttcatcatctcgcgcacgtgcatgttctcgcgcaccagttccgccaggaggcgctctccccccagggataggagctcctggagcgaggcgaagtttttcagcggcttgagtccgtcggccatgggcattttggagagggtttgttgcaagagttccaggcggtcccagagctcggtgatgtgctctacggcatctcgatccagcagacctcctcgtttcgcgggttgggacggctgcgggagtagggcaccagacgatgggcgtccagcgcagccagggtccggtccttccagggtcgcagcgtccgcgtcagggtggtctccgtcacggtgaaggggtgcgcgccgggctgggcgcttgcgagggtgcgcttcaggctcatccggctggtcgaaaaccgctcccgatcggcgccctgcgcgtcggccaggtagcaattgaccatgagttcgtagttgagcgcctcggccgcgtggcctttggcgcggagcttacctttggaagtctgcccgcaggcgggacagaggagggacttgagggcgtagagcttgggggcgaggaagacggactcgggggcgtaggcgtccgcgccgcagtgggcgcagacggtctcgcactccacgagccaggtgaggtcgggctggtcggggtcaaaaaccagtttcccgccgttctttttgatgcgtttcttacctttggtctccatgagctcgtgtccccgctgggtgacaaagaggctgtccgtgtccccgtagaccgactttatgggccggtcctcgagcggtgtgccgcggtcctcctcgtagaggaaccccgcccactccgagacgaaagcccgggtccaggccagcacgaaggaggccacgtgggacgggtagcggtcgttgtccaccagcgggtccaccttttccagggtatgcaaacacatgtccccctcgtccacatccaggaaggtgattggcttgtaagtgtaggccacgtgaccgggggtcccggccgggggggtataaaagggtgcgggtccctgctcgtcctcactgtcttccggatcgctgtccaggagcgccagctgttggggtaggtattccctctcgaaggcgggcatgacctcggcactcaggttgtcagtttctagaaacgaggaggatttgatattgacggtgccggcggagatgcctttcaagagcccctcgtccatctggtcagaaaagacgatctttttgttgtcgagcttggtggcgaaggagccgtagagggcgttggagaggagcttggcgatggagcgcatggtctggtttttttccttgtcggcgcgctccttggcggcgatgttgagctgcacgtactcgcgcgccacgcacttccattcggggaagacggtggtcagctcgtcgggcacgattctgacctgccagccccgattatgcagggtgatgaggtccacactggtggccacctcgccgcgcaggggctcattagtccagcagaggcgtccgcccttgcgcgagcagaaggggggcagggggtccagcatgacctcgtcgggggggtcggcatcgatggtgaagatgccgggcaggaggtcggggtcaaagtagctgatggaagtggccagatcgtccagggcagcttgccattcgcgcacggccagcgcgctctcgtagggactgaggggcgtgccccagggcatgggatgggtaagcgcggaggcgtacatgccgcagatgtcgtagacgtagaggggctcctcgaggatgccgatgtaggtggggtagcagcgccccccgcggatgctggcgcgcacgtagtcatacagctcgtgcgagggggcgaggagccccgggcccaggttggtgcgactgggcttttcggcgcggtagacgatctggcggaaaatggcatgcgagttggaggagatggtgggcctttggaagatgttgaagtgggcgtggggcagtccgaccgagtcgcggatgaagtgggcgtaggagtcttgcagcttggcgacgagctcggcggtgactaggacgtccagagcgcagtagtcgagggtctcctggatgatgtcatacttgagctgtcccttttgtttccacagctcgcggttgagaaggaactcttcgcggtccttccagtactcttcgagggggaacccgtcctgatctgcacggtaagagcctagcatgtagaactggttgacggccttgtaggcgcagcagcccttctccacggggagggcgtaggcctgggcggccttgcgcagggaggtgtgcgtgagggcgaaagtgtccctgaccatgaccttgaggaactggtgcttgaagtcgatatcgtcgcagcccccctgctcccagagctggaagtccgtgcgcttcttgtaggcggggttgggcaaagcgaaagtaacatcgttgaagaggatcttgcccgcgcggggcataaagttgcgagtgatgcggaaaggttggggcacctcggcccggttgttgatgacctgggcggcgagcacgatctcgtcgaagccgttgatgttgtggcccacgatgtagagttccacgaatcgcggacggcccttgacgtggggcagtttcttgagctcctcgtaggtgagctcgtcggggtcgctgagcccgtgctgctcgagcgcccagtcggcgagatgggggttggcgcggaggaaggaagtccagagatccacggccagggcggtttgcagacggtcccggtactgacggaactgctgcccgacggccattttttcgggggtgacgcagtagaaggtgcgggggtccccgtgccagcgatcccatttgagctggagggcgagatcgagggcgagctcgacgagccggtcgtccccggagagtttcatgaccagcatgaaggggacgagctgcttgccgaaggaccccatccaggtgtaggtttccacatcgtaggtgaggaagagcctttcggtgcgaggatgcgagccgatggggaagaactggatctcctgccaccaattggaggaatggctgttgatgtgatggaagtagaaatgccgacggcgcgccgaacactcgtgcttgtgtttatacaagcggccacagtgctcgcaacgctgcacgggatgcacgtgctgcacgagctgtacctgagttcctttgacgaggaatttcagtgggaagtggagtcgtggcgcctgcatctcgtgctgtactacgtcgtggtggtcggcctggccctcttctgcctcgatggtggtcatgctgacgagcccgcgcgggaggcaggtccagacctcggcgcgagcgggtcggagagcgaggacgagggcgcgcaggccggagctgtccagggtcctgagacgctgcggagtcaggtcagtgggcagcggcggcgcgcggttgacttgcaggagtttttccagggcgcgcgggaggtccagatggtacttgatctccaccgcgccattggtggcgacgtcgatggcttgcagggtcccgtgcccctggggtgtgaccaccgtcccccgtttcttcttgggcggctggggcgacgggggcggtgcctcttccatggttagaagcggcggcgaggacgcgcgccgggcggcaggggcggctcggggcccggaggcaggggcggcaggggcacgtcggcgccgcgcgcgggtaggttctggtactgcgcccggagaagactggcgtgagcgacgacgcgacggttgacgtcctggatctgacgcctctgggtgaaggccacgggacccgtgagtttgaacctgaaagagagttcgacagaatcaatctcggtatcgttgacggcggcctgccgcaggatctcttgcacgtcgcccgagttgtcctggtaggcgatctcggtcatgaactgctcgatctcctcctcttgaaggtctccgcggccggcgcgctccacggtggccgcgaggtcgttggagatgcggcccatgagctgcgagaaggcgttcatgcccgcctcgttccagacgcggctgtagaccacgacgccctcgggatcgcgggcgcgcatgaccacctgggcgaggttgagctccacgtggcgcgtgaagaccgcgtagttgcagaggcgctggtagaggtagttgagcgtggtggcgatgtgctcggtgacgaagaaatacatgatccagcggcggagcggcatctcgctgacgtcgcccagcgcctccaaacgttccatggcctcgtaaaagtccacggcgaagttgaaaaactgggagttgcgcgccgagacggtcaactcctcctccagaagacggatgagctcggcgatggtggcgcgcacctcgcgctcgaaggcccccgggagttcctccacttcctcttcttcctcctccactaacatctcttctacttcctcctcaggcggcagtggtggcgggggagggggcctgcgtcgccggcggcgcacgggcagacggtcgatgaagcgctcgatggtctcgccgcgccggcgtcgcatggtctcggtgacggcgcgcccgtcctcgcggggccgcagcgtgaagacgccgccgcgcatctccaggtggccgggggggtccccgttgggcagggagagggcgctgacgatgcatcttatcaattgccccgtagggactccgcgcaaggacctgagcgtctcgagatccacgggatctgaaaaccgctgaacgaaggcttcgagccagtcgcagtcgcaaggtaggctgagcacggtttcttctggcgggtcatgttggttgggagcggggcgggcgatgctgctggtgatgaagttgaaataggcggttctgagacggcggatggtggcgaggagcaccaggtctttgggcccggcttgctggatgcgcagacggtcggccatgccccaggcgtggtcctgacacctggccaggtccttgtagtagtcctgcatgagccgctccacgggcacctcctcctcgcccgcgcggccgtgcatgcgcgtgagcccgaagccgcgctggggctggacgagcgccaggtcggcgacgacgcgctcggcgaggatggcttgctggatctgggtgagggtggtctggaagtcatcaaagtcgacgaagcggtggtaggctccggtgttgatggtgtaggagcagttggccatgacggaccagttgacggtctggtggcccggacgcacgagctcgtggtacttgaggcgcgagtaggcgcgcgtgtcgaagatgtagtcgttgcaggtgcgcaccaggtactggtagccgatgaggaagtgcggcggcggctggcggtagagcggccatcgctcggtggcgggggcgccgggcgcgaggtcctcgagcatggtgcggtggtagccgtagatgtacctggacatccaggtgatgccggcggcggtggtggaggcgcgcgggaactcgcggacgcggttccagatgttgcgcagcggcaggaagtagttcatggtgggcacggtctggcccgtgaggcgcgcgcagtcgtggatgctctatacgggcaaaaacgaaagcggtcagcggctcgactccgtggcctggaggctaagcgaacgggttgggctgcgcgtgtaccccggttcgaatctcgaatcaggctggagccgcagctaacgtggtattggcactcccgtctcgacccaagcctgcaccaaccctccaggatacggaggcgggtcgttttgcaacttttttttggaggccggatgagactagtaagcgcggaaagcggccgaccgcgatggctcgctgccgtagtctggagaagaatcgccagggttgcgttgcggtgtgccccggttcgaggccggccggattccgcggctaacgagggcgtggctgccccgtcgtttccaagaccccatagccagccgacttctccagttacggagcgagcccctcttttgttttgtttgtttttgccagatgcatcccgtactgcggcagatgcgcccccaccaccctccaccgcaacaacagccccctccacagccggcgcttctgcccccgccccagcagcaacttccagccacgaccgccgcggccgccgtgagcggggctggacagagttatgatcaccagctggccttggaagagggcgaggggctggcgcgcctgggggcgtcgtcgccggagcggcacccgcgcgtgcagatgaaaagggacgctcgcgaggcctacgtgcccaagcagaacctgttcagagacaggagcggcgaggagcccgaggagatgcgcgcggcccggttccacgcggggcgggagctgcggcgcggcctggaccgaaagagggtgctgagggacgaggatttcgaggcggacgagctgacggggatcagccccgcgcgcgcgcacgtggccgcggccaacctggtcacggcgtacgagcagaccgtgaaggaggagagcaacttccaaaaatccttcaacaaccacgtgcgcaccctgatcgcgcgcgaggaggtgaccctgggcctgatgcacctgtgggacctgctggaggccatcgtgcagaaccccaccagcaagccgctgacggcgcagctgttcctggtggtgcagcatagtcgggacaacgaagcgttcagggaggcgctgctgaatatcaccgagcccgagggccgctggctcctggacctggtgaacattctgcagagcatcgtggtgcaggagcgcgggctgccgctgtccgagaagctggcggccatcaacttctcggtgctgagtttgggcaagtactacgctaggaagatctacaagaccccgtacgtgcccatagacaaggaggtgaagatcgacgggttttacatgcgcatgaccctgaaagtgctgaccctgagcgacgatctgggggtgtaccgcaacgacaggatgcaccgtgcggtgagcgccagcaggcggcgcgagctgagcgaccaggagctgatgcatagtctgcagcgggccctgaccggggccgggaccgagggggagagctactttgacatgggcgcggacctgcactggcagcccagccgccgggccttggaggcggcggcaggaccctacgtagaagaggtggacgatgaggtggacgaggagggcgagtacctggaagactgatggcgcgaccgtatttttgctagatgcaacaacaacagccacctcctgatcccgcgatgcgggcggcgctgcagagccagccgtccggcattaactcctcggacgattggacccaggccatgcaacgcatcatggcgctgacgacccgcaaccccgaagcctttagacagcagccccaggccaaccggctctcggccatcctggaggccgtggtgccctcgcgctccaaccccacgcacgagaaggtcctggccatcgtgaacgcgctggtggagaacaaggccatccgcggcgacgaggccggcctggtgtacaacgcgctgctggagcgcgtggcccgctacaacagcaccaacgtgcagaccaacctggaccgcatggtgaccgacgtgcgcgaggccgtggcccagcgcgagcggttccaccgcgagtccaacctgggatccatggtggcgctgaacgccttcctcagcacccagcccgccaacgtgccccggggccaggaggactacaccaacttcatcagcgccctgcgcctgatggtgaccgaggtgccccagagcgaggtgtaccagtccgggccggactacttcttccagaccagtcgccagggcttgcagaccgtgaacctgagccaggctttcaagaacttgcagggcctgtggggcgtgcaggccccggtcggggaccgcgcgacggtgtcgagcctgctgacgccgaactcgcgcctgctgctgctgctggtggcccccttcacggacagcggcagcatcaaccgcaactcgtacctgggctacctgattaacctgtaccgcgaggccatcggccaggcgcacgtggacgagcagacctaccaggagatcacccacgtgagccgcgccctgggccaggacgacccgggcaacctggaagccaccctgaactttttgctgaccaaccggtcgcagaagatcccgccccagtacgcgctcagcaccgaggaggagcgcatcctgcgttacgtgcagcagagcgtgggcctgttcctgatgcaggagggggccacccccagcgccgcgctcgacatgaccgcgcgcaacatggagcccagcatgtacgccagcaaccgcccgttcatcaataaactgatggactacttgcatcgggcggccgccatgaactctgactatttcaccaacgccatcctgaatccccactggctcccgccgccggggttctacacgggcgagtacgacatgcccgaccccaatgacgggttcctgtgggacgatgtggacagcagcgtgttctccccccgaccgggtgctaacgagcgccccttgtggaagaaggaaggcagcgaccgacgcccgtcctcggcgctgtccggccgcgagggtgctgccgcggcggtgcccgaggccgccagtcctttcccgagcttgcccttctcgctgaacagtatccgcagcagcgagctgggcaggatcacgcgcccgcgcttgctgggcgaagaggagtacttgaatgactcgctgttgagacccgagcgggagaagaacttccccaataacgggatagaaagcctggtggacaagatgagccgctggaagacgtatgcgcaggagcacagggacgatccccgggcgtcgcagggggccacgagccggggcagcgccgcccgtaaacgccggtggcacgacaggcagcggggacagatgtgggacgatgaggactccgccgacgacagcagcgtgttggacttgggtgggagtggtaacccgttcgctcacctgcgcccccgtatcgggcgcatgatgtaagagaaaccgaaaataaatgatactcaccaaggccatggcgaccagcgtgcgttcgtttcttctctgttgttgttgtatctagtatgatgaggcgtgcgtacccggagggtcctcctccctcgtacgagagcgtgatgcagcaggcgatggcggcggcggcgatgcagcccccgctggaggctccttacgtgcccccgcggtacctggcgcctacggaggggcggaacagcattcgttactcggagctggcacccttgtacgataccacccggttgtacctggtggacaacaagtcggcggacatcgcctcgctgaactaccagaacgaccacagcaacttcctgaccaccgtggtgcagaacaatgacttcacccccacggaggccagcacccagaccatcaactttgacgagcgctcgcggtggggcggccagctgaaaaccatcatgcacaccaacatgcccaacgtgaacgagttcatgtacagcaacaagttcaaggcgcgggtgatggtctcccgcaagacccccaatggggtgacagtgacagaggattatgatggtagtcaggatgagctgaagtatgaatgggtggaatttgagctgcccgaaggcaacttctcggtgaccatgaccatcgacctgatgaacaacgccatcatcgacaattacttggcggtggggcggcagaacggggtgctggagagcgacatcggcgtgaagttcgacactaggaacttcaggctgggctgggaccccgtgaccgagctggtcatgcccggggtgtacaccaacgaggctttccatcccgatattgtcttgctgcccggctgcggggtggacttcaccgagagccgcctcagcaacctgctgggcattcgcaagaggcagcccttccaggaaggcttccagatcatgtacgaggatctggaggggggcaacatccccgcgctcctggatgtcgacgcctatgagaaaagcaaggaggatgcagcagctgaagcaactgcagccgtagctaccgcctctaccgaggtcaggggcgataattttgcaagcgccgcagcagtggcagcggccgaggcggctgaaaccgaaagtaagatagtcattcagccggtggagaaggatagcaagaacaggagctacaacgtactaccggacaagataaacaccgcctaccgcagctggtacctagcctacaactatggcgaccccgagaagggcgtgcgctcctggacgctgctcaccacctcggacgtcacctgcggcgtggagcaagtctactggtcgctgcccgacatgatgcaagacccggtcaccttccgctccacgcgtcaagttagcaactacccggtggtgggcgccgagctcctgcccgtctactccaagagcttcttcaacgagcaggccgtctactcgcagcagctgcgcgccttcacctcgcttacgcacgtcttcaaccgcttccccgagaaccagatcctcgtccgcccgcccgcgcccaccattaccaccgtcagtgaaaacgttcctgctctcacagatcacgggaccctgccgctgcgcagcagtatccggggagtccagcgcgtgaccgttactgacgccagacgccgcacctgcccctacgtctacaaggccctgggcatagtcgcgccgcgcgtcctctcgagccgcaccttctaaatgtccattctcatctcgcccagtaataacaccggttggggcctgcgcgcgcccagcaagatgtacggaggcgctcgccaacgctccacgcaacaccccgtgcgcgtgcgcgggcacttccgcgctccctggggcgccctcaagggccgcgtgcggtcgcgcaccaccgtcgacgacgtgatcgaccaggtggtggccgacgcgcgcaactacacccccgccgccgcgcccgtctccaccgtggacgccgtcatcgacagcgtggtggccgacgcgcgccggtacgcccgcgccaagagccggcggcggcgcatcgcccggcggcaccggagcacccccgccatgcgcgcggcgcgagccttgctgcgcagggccaggcgcacgggacgcagggccatgctcagggcggccagacgcgcggcttcaggcgccagcgccggcaggacccggagacgcgcggccacggcggcggcagcggccatcgccagcatgtcccgcccgcggcgagggaacgtgtactgggtgcgcgacgccgccaccggtgtgcgcgtgcccgtgcgcacccgcccccctcgcacttgaagatgttcacttcgcgatgttgatgtgtcccagcggcgaggaggatgtccaagcgcaaattcaaggaagagatgctccaggtcatcgcgcctgagatctacggccctgcggtggtgaaggaggaaagaaagccccgcaaaatcaagcgggtcaaaaaggacaaaaaggaagaagaaagtgatgtggacggattggtggagtttgtgcgcgagttcgccccccggcggcgcgtgcagtggcgcgggcggaaggtgcaaccggtgctgagacccggcaccaccgtggtcttcacgcccggcgagcgctccggcaccgcttccaagcgctcctacgacgaggtgtacggggatgatgatattctggagcaggcggccgagcgcctgggcgagtttgcttacggcaagcgcagccgttccgcaccgaaggaagaggcggtgtccatcccgctggaccacggcaaccccacgccgagcctcaagcccgtgaccttgcagcaggtgctgccgaccgcggcgccgcgccgggggttcaagcgcgagggcgaggatctgtaccccaccatgcagctgatggtgcccaagcgccagaagctggaagacgtgctggagaccatgaaggtggacccggacgtgcagcccgaggtcaaggtgcggcccatcaagcaggtggccccgggcctgggcgtgcagaccgtggacatcaagattcccacggagcccatggaaacgcagaccgagcccatgatcaagcccagcaccagcaccatggaggtgcagacggatccctggatgccatcggctcctagtcgaagaccccggcgcaagtacggcgcggccagcctgctgatgcccaactacgcgctgcatccttccatcatccccacgccgggctaccgcggcacgcgcttctaccgcggtcataccagcagccgccgccgcaagaccaccactcgccgccgccgtcgccgcaccgccgctgcaaccacccctgccgccctggtgcggagagtgtaccgccgcggccgcgcacctctgaccctgccgcgcgcgcgctaccacccgagcatcgccatttaaactttcgcctgctttgcagatcaatggccctcacatgccgccttcgcgttcccattacgggctaccgaggaagaaaaccgcgccgtagaaggctggcggggaacgggatgcgtcgccaccaccaccggcggcggcgcgccatcagcaagcggttggggggaggcttcctgcccgcgctgatccccatcatcgccgcggcgatcggggcgatccccggcattgcttccgtggcggtgcaggcctctcagcgccactgagacacacttggaaacatcttgtaataaaccaatggactctgacgctcctggtcctgtgatgtgttttcgtagacagatggaagacatcaatttttcgtccctggctccgcgacacggcacgcggccgttcatgggcacctggagcgacatcggcaccagccaactgaacgggggcgccttcaattggagcagtctctggagcgggcttaagaatttcgggtccacgcttaaaacctatggcagcaaggcgtggaacagcaccacagggcaggcgctgagggataagctgaaagagcagaacttccagcagaaggtggtcgatgggctcgcctcgggcatcaacggggtggtggacctggccaaccaggccgtgcagcggcagatcaacagccgcctggacccggtgccgcccgccggctccgtggagatgccgcaggtggaggaggagctgcctcccctggacaagcggggcgagaagcgaccccgccccgatgcggaggagacgctgctgacgcacacggacgagccgcccccgtacgaggaggcggtgaaactgggtctgcccaccacgcggcccatcgcgcccctggccaccggggtgctgaaacccgaaaagcccgcgaccctggacttgcctcctccccagccttcccgcccctctacagtggctaagcccctgccgccggtggccgtggcccgcgcgcgacccgggggcaccgcccgccctcatgcgaactggcagagcactctgaacagcatcgtgggtctgggagtgcagagtgtgaagcgccgccgctgctattaaacctaccgtagcgcttaacttgcttgtctgtgtgtgtatgtattatgtcgccgccgccgctgtccaccagaaggaggagtgaagaggcgcgtcgccgagttgcaagatggccaccccatcgatgctgccccagtgggcgtacatgcacatcgccggacaggacgcttcggagtacctgagtccgggtctggtgcagtttgcccgcgccacagacacctacttcagtctggggaacaagtttaggaaccccacggtggcgcccacgcacgatgtgaccaccgaccgcagccagcggctgacgctgcgcttcgtgcccgtggaccgcgaggacaacacctactcgtacaaagtgcgctacacgctggccgtgggcgacaaccgcgtgctggacatggccagcacctactttgacatccgcggcgtgctggatcggggccctagcttcaaaccctactccggcaccgcctacaacagtctggcccccaagggagcacccaacacttgtcagtggacatataaagccgatggtgaaactgccacagaaaaaacctatacatatggaaatgcacccgtgcagggcattaacatcacaaaagatggtattcaacttggaactgacaccgatgatcagccaatctacgcagataaaacctatcagcctgaacctcaagtgggtgatgctgaatggcatgacatcactggtactgatgaaaagtatggaggcagagctcttaagcctgataccaaaatgaagccttgttatggttcttttgccaagcctactaataaagaaggaggtcaggcaaatgtgaaaacaggaacaggcactactaaagaatatgacatagacatggctttctttgacaacagaagtgcggctgctgctggcctagctccagaaattgttttgtatactgaaaatgtggatttggaaactccagatacccatattgtatacaaagcaggcacagatgacagcagctcttctattaatttgggtcagcaagccatgcccaacagacctaactacattggtttcagagacaactttatcgggctcatgtactacaacagcactggcaatatgggggtgctggccggtcaggcttctcagctgaatgctgtggttgacttgcaagacagaaacaccgagctgtcctaccagctcttgcttgactctctgggtgacagaacccggtatttcagtatgtggaatcaggcggtggacagctatgatcctgatgtgcgcattattgaaaatcatggtgtggaggatgaacttcccaactattgtttccctctggatgctgttggcagaacagatacttatcagggaattaaggctaatggaactgatcaaaccacatggaccaaagatgacagtgtcaatgatgctaatgagataggcaagggtaatccattcgccatggaaatcaacatccaagccaacctgtggaggaacttcctctacgccaacgtggccctgtacctgcccgactcttacaagtacacgccggccaatgttaccctgcccaccaacaccaacacctacgattacatgaacggccgggtggtggcgccctcgctggtggactcctacatcaacatcggggcgcgctggtcgctggatcccatggacaacgtgaaccccttcaaccaccaccgcaatgcggggctgcgctaccgctccatgctcctgggcaacgggcgctacgtgcccttccacatccaggtgccccagaaatttttcgccatcaagagcctcctgctcctgcccgggtcctacacctacgagtggaacttccgcaaggacgtcaacatgatcctgcagagctccctcggcaacgacctgcgcacggacggggcctccatctccttcaccagcatcaacctctacgccaccttcttccccatggcgcacaacacggcctccacgctcgaggccatgctgcgcaacgacaccaacgaccagtccttcaacgactacctctcggcggccaacatgctctaccccatcccggccaacgccaccaacgtgcccatctccatcccctcgcgcaactgggccgccttccgcggctggtccttcacgcgtctcaagaccaaggagacgccctcgctgggctccgggttcgacccctacttcgtctactcgggctccatcccctacctcgacggcaccttctacctcaaccacaccttcaagaaggtctccatcaccttcgactcctccgtcagctggcccggcaacgaccggctcctgacgcccaacgagttcgaaatcaagcgcaccgtcgacggcgagggctacaacgtggcccagtgcaacatgaccaaggactggttcctggtccagatgctggcccactacaacatcggctaccagggcttctacgtgcccgagggctacaaggaccgcatgtactccttcttccgcaacttccagcccatgagccgccaggtggtggacgaggtcaactacaaggactaccaggccgtcaccctggcctaccagcacaacaactcgggcttcgtcggctacctcgcgcccaccatgcgccagggccagccctaccccgccaactacccctacccgctcatcggcaagagcgccgtcaccagcgtcacccagaaaaagttcctctgcgacagggtcatgtggcgcatccccttctccagcaacttcatgtccatgggcgcgctcaccgacctcggccagaacatgctctatgccaactccgcccacgcgctagacatgaatttcgaagtcgaccccatggatgagtccacccttctctatgttgtcttcgaagtcttcgacgtcgtccgagtgcaccagccccaccgcggcgtcatcgaggccgtctacctgcgcacccccttctcggccggtaacgccaccacctaagctcttgcttcttgcaagccatggccgcgggctccggcgagcaggagctcagggccatcatccgcgacctgggctgcgggccctacttcctgggcaccttcgataagcgcttcccgggattcatggccccgcacaagctggcctgcgccatcgtcaacacggccggccgcgagaccgggggcgagcactggctggccttcgcctggaacccgcgctcgaacacctgctacctcttcgaccccttcgggttctcggacgagcgcctcaagcagatctaccagttcgagtacgagggcctgctgcgccgcagcgccctggccaccgaggaccgctgcgtcaccctggaaaagtccacccagaccgtgcagggtccgcgctcggccgcctgcgggctcttctgctgcatgttcctgcacgccttcgtgcactggcccgaccgccccatggacaagaaccccaccatgaacttgctgacgggggtgcccaacggcatgctccagtcgccccaggtggaacccaccctgcgccgcaaccaggaggcgctctaccgcttcctcaactcccactccgcctactttcgctcccaccgcgcgcgcatcgagaaggccaccgccttcgaccgcatgaatcaagacatgtaaaccgtgtgtgtatgttaaatgtctttaataaacagcactttcatgttacacatgcatctgagatgatttatttagaaatcgaaagggttctgccgggtctcggcatggcccgcgggcagggacacgttgcggaactggtacttggccagccacttgaactcggggatcagcagtttgggcagcggggtgtcggggaaggagtcggtccacagcttccgcgtcagttgcagggcgcccagcaggtcgggcgcggagatcttgaaatcgcagttgggacccgcgttctgcgcgcgggagttgcggtacacggggttgcagcactggaacaccatcagggccgggtgcttcacgctcgccagcaccgtcgcgtcggtgatgctctccacgtcgaggtcctcggcgttggccatcccgaagggggtcatcttgcaggtctgccttcccatggtgggcacgcacccgggcttgtggttgcaatcgcagtgcagggggatcagcatcatctgggcctggtcggcgttcatccccgggtacatggccttcatgaaagcctccaattgcctgaacgcctgctgggccttggctccctcggtgaagaagaccccgcaggacttgctagagaactggttggtggcgcacccggcgtcgtgcacgcagcagcgcgcgtcgttgttggccagctgcaccacgctgcgcccccagcggttctgggtgatcttggcccggtcggggttctccttcagcgcgcgctgcccgttctcgctcgccacatccatctcgatcatgtgctccttctggatcatggtggtcccgtgcaggcaccgcagcttgccctcggcctcggtgcacccgtgcagccacagcgcgcacccggtgcactcccagttcttgtgggcgatctgggaatgcgcgtgcacgaagccctgcaggaagcggcccatcatggtggtcagggtcttgttgctagtgaaggtcagcggaatgccgcggtgctcctcgttgatgtacaggtggcagatgcggcggtacacctcgccctgctcgggcatcagctggaagttggctttcaggtcggtctccacgcggtagcggtccatcagcatagtcatgatttccatacccttctcccaggccgagacgatgggcaggctcatagggttcttcaccatcatcttagcgctagcagccgcggccagggggtcgctctcgtccagggtctcaaagctccgcttgccgtccttctcggtgatccgcaccggggggtagctgaagcccacggccgccagctcctcctcggcctgtctttcgtcctcgctgtcctggctgacgtcctgcaggaccacatgcttggtcttgcggggtttcttcttgggcggcagcggcggcggagatgttggagatggcgagggggagcgcgagttctcgctcaccactactatctcttcctcttcttggtccgaggccacgcggcggtaggtatgtctcttcgggggcagaggcggaggcgacgggctctcgccgccgcgacttggcggatggctggcagagccccttccgcgttcgggggtgcgctcccggcggcgctctgactgacttcctccgcggccggccattgtgttctcctagggaggaacaacaagcatggagactcagccatcgccaacctcgccatctgcccccaccgccgacgagaagcagcagcagcagaatgaaagcttaaccgccccgccgcccagccccgccacctccgacgcggccgtcccagacatgcaagagatggaggaatccatcgagattgacctgggctatgtgacgcccgcggagcacgaggaggagctggcagtgcgcttttcacaagaagagatacaccaagaacagccagagcaggaagcagagaatgagcagagtcaggctgggctcgagcatgacggcgactacctccacctgagcgggggggaggacgcgctcatcaagcatctggcccggcaggccaccatcgtcaaggatgcgctgctcgaccgcaccgaggtgcccctcagcgtggaggagctcagccgcgcctacgagttgaacctcttctcgccgcgcgtgccccccaagcgccagcccaatggcacctgcgagcccaacccgcgcctcaacttctacccggtcttcgcggtgcccgaggccctggccacctaccacatctttttcaagaaccaaaagatccccgtctcctgccgcgccaaccgcacccgcgccgacgcccttttcaacctgggtcccggcgcccgcctacctgatatcgcctccttggaagaggttcccaagatcttcgagggtctgggcagcgacgagactcgggccgcgaacgctctgcaaggagaaggaggagagcatgagcaccacagcgccctggtcgagttggaaggcgacaacgcgcggctggcggtgctcaaacgcacggtcgagctgacccatttcgcctacccggctctgaacctgccccccaaagtcatgagcgcggtcatggaccaggtgctcatcaagcgcgcgtcgcccatctccgaggacgagggcatgcaagactccgaggagggcaagcccgtggtcagcgacgagcagctggcccggtggctgggtcctaatgctagtccccagagtttggaagagcggcgcaaactcatgatggccgtggtcctggtgaccgtggagctggagtgcctgcgccgcttcttcgccgacgcggagaccctgcgcaaggtcgaggagaacctgcactacctcttcaggcacgggttcgtgcgccaggcctgcaagatctccaacgtggagctgaccaacctggtctcctacatgggcatcttgcacgagaaccgcctggggcagaacgtgctgcacaccaccctgcgcggggaggcccggcgcgactacatccgcgactgcgtctacctctacctctgccacacctggcagacgggcatgggcgtgtggcagcagtgtctggaggagcagaacctgaaagagctctgcaagctcctgcagaagaacctcaagggtctgtggaccgggttcgacgagcgcaccaccgcctcggacctggccgacctcattttccccgagcgcctcaggctgacgctgcgcaacggcctgcccgactttatgagccaaagcatgttgcaaaactttcgctctttcatcctcgaacgctccggaatcctgcccgccacctgctccgcgctgccctcggacttcgtgccgctgaccttccgcgagtgccccccgccgctgtggagccactgctacctgctgcgcctggccaactacctggcctaccactcggacgtgatcgaggacgtcagcggcgagggcctgctcgagtgccactgccgctgcaacctctgcacgccgcaccgctccctggcctgcaacccccagctgctgagcgagacccagatcatcggcaccttcgagttgcaagggcccagcgaaggcgagggttcagccgccaaggggggtctgaaactcaccccggggctgtggacctcggcctacttgcgcaagttcgtgcccgaggactaccatcccttcgagatcaggttctacgaggaccaatcccatccgcccaaggccgagctgtcggcctgcgtcatcacccagggggcgatcctggcccaattgcaagccatccagaaatcccgccaagaattcttgctgaaaaagggccgcggggtctacctcgacccccagaccggtgaggagctcaaccccggcttcccccaggatgccccgaggaaacaagaagctgaaagtggagctgccgcccgtggaggatttggaggaagactgggagaacagcagtcaggcagaggaggaggagatggaggaagactgggacagcactcaggcagaggaggacagcctgcaagacagtctggaggaagacgaggaggaggcagaggaggaggtggaagaagcagccgccgccagaccgtcgtcctcggcgggggagaaagcaagcagcacggataccatctccgctccgggtcggggtcccgctcgaccacacagtagatgggacgagaccggacgattcccgaaccccaccacccagaccggtaagaaggagcggcagggatacaagtcctggcgggggcacaaaaacgccatcgtctcctgcttgcaggcctgcgggggcaacatctccttcacccggcgctacctgctcttccaccgcggggtgaactttccccgcaacatcttgcattactaccgtcacctccacagcccctactacttccaagaagaggcagcagcagcagaaaaagaccagcagaaaaccagcagctagaaaatccacagcggcggcagcaggtggactgaggatcgcggcgaacgagccggcgcaaacccgggagctgaggaaccggatctttcccaccctctatgccatcttccagcagagtcgggggcaggagcaggaactgaaagtcaagaaccgttctctgcgctcgctcacccgcagttgtctgtatcacaagagcgaagaccaacttcagcgcactctcgaggacgccgaggctctcttcaacaagtactgcgcgctcactcttaaagagtagcccgcgcccgcccagtcgcagaaaaaggcgggaattacgtcacctgtgcccttcgccctagccgcctccacccatcatcatgagcaaagagattcccacgccttacatgtggagctaccagccccagatgggcctggccgccggtgccgcccaggactactccacccgcatgaattggctcagcgccgggcccgcgatgatctcacgggtgaatgacatccgcgcccaccgaaaccagatactcctagaacagtcagcgctcaccgccacgccccgcaatcacctcaatccgcgtaattggcccgccgccctggtgtaccaggaaattccccagcccacgaccgtactacttccgcgagacgcccaggccgaagtccagctgactaactcaggtgtccagctggcgggcggcgccaccctgtgtcgtcaccgccccgctcagggtataaagcggctggtgatccggggcagaggcacacagctcaacgacgaggtggtgagctcttcgctgggtctgcgacctgacggagtcttccaactcgccggatcggggagatcttccttcacgcctcgtcaggccgtcctgactttggagagttcgtcctcgcagccccgctcgggtggcatcggcactctccagttcgtggaggagttcactccctcggtctacttcaaccccttctccggctcccccggccactacccggacgagttcatcccgaacttcgacgccatcagcgagtcggtggacggctacgattgaatgtcccatggtggcgcagctgacctagctcggcttcgacacctggaccactgccgccgcttccgctgcttcgctcgggatctcgccgagtttgcctactttgagctgcccgaggagcaccctcagggcccggcccacggagtgcggatcgtcgtcgaagggggcctcgactcccacctgcttcggatcttcagccagcgtccgatcctggtcgagcgcgagcaaggacagacccttctgactctgtactgcatctgcaaccaccccggcctgcatgaaagtctttgttgtctgctgtgtactgagtataataaaagctgagatcagcgactactccggacttccgtgtgttcctgaatccatcaaccagtctttgttcttcaccgggaacgagaccgagctccagctccagtgtaagccccacaagaagtacctcacctggctgttccagggctccccgatcgccgttgtcaaccactgcgacaacgacggagtcctgctgagcggccctgccaaccttactttttccacccgcagaagcaagctccagctcttccaacccttcctccccgggacctatcagtgcgtctcgggaccctgccatcacaccttccacctgatcccgaataccacagcgtcgctccccgctactaacaaccaaactaacctccaccaacgccaccgtcgcgacggccacaatacatgcccatattagactatgaggccgagccacagcgacccatgctccccgctattagttacttcaatctaaccggcggagatgactgacccactggccaacaacaacgtcaacgaccttctcctggacatggacggccgcgcctcggagcagcgactcgcccaacttcgcattcgccagcagcaggagagagccgtcaaggagctgcaggatgcggtggccatccaccagtgcaagagaggcatcttctgcctggtgaaacaggccaagatctcctacgaggtcactccaaacgaccatcgcctctcctacgagctcctgcagcagcgccagaagttcacctgcctggtcggagtcaaccccatcgtcatcacccagcagtctggcgataccaaggggtgcatccactgctcctgcgactcccccgactgcgtccacactctgatcaagaccctctgcggcctccgcgacctcctccccatgaactaatcacccccttatccagtgaaataaagatcatattgatgatgattttacagaaataaaaaataatcatttgatttgaaataaagatacaatcatattgatgatttgagtttaacaaaaaaataaagaatcacttacttgaaatctgataccaggtctctgtccatgttttctgccaacaccacttcactcccctcttcccagctctggtactgcaggccccggcgggctgcaaacttcctccacacgctgaaggggatgtcaaattcctcctgtccctcaatcttcattttatcttctatcagatgtccaaaaagcgcgtccgggtggatgatgacttcgaccccgtctacccctacgatgcagacaacgcaccgaccgtgcccttcatcaacccccccttcgtctcttcagatggattccaagagaagcccctgggggtgttgtccctgcgactggccgaccccgtcaccaccaagaacggggaaatcaccctcaagctgggagagggggtggacctcgattcctcgggaaaactcatctccaacacggccaccaaggccgccgcccctctcagtttttccaacaacaccatttcccttaacatggatcaccccttttacactaaagatggaaaattatccttacaagtttctccaccattaaatatactgagaacaagcattctaaacacactagctttaggttttggatcaggtttaggactccgtggctctgccttggcagtacagttagtctctccacttacatttgatactgatggaaacataaagcttaccttagacagaggtttgcatgttacaacaggagatgcaattgaaagcaacataagctgggctaaaggtttaaaatttgaagatggagccatagcaaccaacattggaaatgggttagagtttggaagcagtagtacagaaacaggtgttgatgatgcttacccaatccaagttaaacttggatctggccttagctttgacagtacaggagccataatggctggtaacaaagaagacgataaactcactttgtggacaacacctgatccatcaccaaactgtcaaatactcgcagaaaatgatgcaaaactaacactttgcttgactaaatgtggtagtcaaatactggccactgtgtcagtcttagttgtaggaagtggaaacctaaaccccattactggcaccgtaagcagtgctcaggtgtttctacgttttgatgcaaacggtgttcttttaacagaacattctacactaaaaaaatactgggggtataggcagggagatagcatagatggcactccatataccaatgctgtaggattcatgcccaatttaaaagcttatccaaagtcacaaagttctactactaaaaataatatagtagggcaagtatacatgaatggagatgtttcaaaacctatgcttctcactataaccctcaatggtactgatgacagcaacagtacatattcaatgtcattttcatacacctggactaatggaagctatgttggagcaacatttggggctaactcttataccttctcatacatcgcccaagaatgaacactgtatcccaccctgcatgccaacccttcccaccccactctgtggaacaaactctgaaacacaaaataaaataaagttcaagtgttttattgattcaacagttttacaggattcgagcagttatttttcctccaccctcccaggacatggaatacaccaccctctccccccgcacagccttgaacatctgaatgccattggtgatggacatgcttttggtctccacgttccacacagtttcagagcgagccagtctcgggtcggtcagggagatgaaaccctccgggcactcccgcatctgcacctcacagctcaacagctgaggattgtcctcggtggtcgggatcacggttatctggaagaagcagaagagcggcggtgggaatcatagtccgcgaacgggatcggccggtggtgtcgcatcaggccccgcagcagtcgctgccgccgccgctccgtcaagctgctgctcagggggtccgggtccagggactccctcagcatgatgcccacggccctcagcatcagtcgtctggtgcggcgggcgcagcagcgcatgcggatctcgctcaggtcgctgcagtacgtgcaacacagaaccaccaggttgttcaacagtccatagttcaacacgctccagccgaaactcatcgcgggaaggatgctacccacgtggccgtcgtaccagatcctcaggtaaatcaagtggtgccccctccagaacacgctgcccacgtacatgatctccttgggcatgtggcggttcaccacctcccggtaccacatcaccctctggttgaacatgcagccccggatgatcctgcggaaccacagggccagcaccgccccgcccgccatgcagcgaagagaccccgggtcccggcaatggcaatggaggacccaccgctcgtacccgtggatcatctgggagctgaacaagtctatgttggcacagcacaggcatatgctcatgcatctcttcagcactctcaactcctcgggggtcaaaaccatatcccagggcacggggaactcttgcaggacagcgaaccccgcagaacagggcaatcctcgcacagaacttacattgtgcatggacagggtatcgcaatcaggcagcaccgggtgatcctccaccagagaagcgcgggtctcggtctcctcacagcgtggtaagggggccggccgatacgggtgatggcgggacgcggctgatcgtgttcgcgaccgtgtcatgatgcagttgctttcggacattttcgtacttgctgtagcagaacctggtccgggcgctgcacaccgatcgccggcggcggtctcggcgcttggaacgctcggtgttgaaattgtaaaacagccactctctcagaccgtgcagcagatctagggcctcaggagtgatgaagatcccatcatgcctgatggctctgatcacatcgaccaccgtggaatgggccagacccagccagatgatgcaattttgttgggtttcggtgacggcgggggagggaagaacaggaagaaccatgattaacttttaatccaaacggtctcggagtacttcaaaatgaagatcgcggagatggcacctctcgcccccgctgtgttggtggaaaataacagccaggtcaaaggtgatacggttctcgagatgttccacggtggcttccagcaaagcctccacgcgcacatccagaaacaagacaatagcgaaagcgggagggttctctaattcctcaatcatcatgttacactcctgcaccatccccagataattttcatttttccagccttgaatgattcgaactagttcgtgaggtaaatccaagccagccatgataaagagctcgcgcagagcgccctccaccggcattcttaagcacaccctcataattccaagatattctgctcctggttcacctgcagcagattgacaagcggaatatcaaaatctctgccgcgatccctgagctcctccctcagcaataactgtaagtactctttcatatcctctccgaaatttttagccataggaccaccaggaataagattagggcaagccacagtacagataaaccgaagtcctccccagtgagcattgccaaatgcaagactgctataagcatgctggctagacccggtgatatcttccagataactggacagaaaatcgcccaggcaatttttaagaaaatcaacaaaagaaaaatcctccaggtggacgtttagagcctcgggaacaacgatgaagtaaatgcaagcggtgcgttccagcatggttagttagctgatctgtagaaaaaacaaaaatgaacattaaaccatgctagcctggcgaacaggtgggtaaatcgttctctccagcaccaggcaggccacggggtctccggcgcgaccctcgtaaaaattgtcgctatgattgaaaaccatcacagagagacgttcccggtggccggcgtgaatgattcgacaagatgaatacacccccggaacattggcgtccgcgagtgaaaaaaagcgcccgaggaagcaataaggcactacaatgctcagtctcaagtccagcaaagcgatgccatgcggatgaagcacaaaattctcaggtgcgtacaaaatgtaattactcccctcctgcacaggcagcaaagcccccgatccctccaggtacacatacaaagcctcagcgtccatagcttaccgagcagcagcacacaacaggcgcaagagtcagagaaaggctgagctctaacctgtccacccgctctctgctcaatatatagcccagatctacactgacgtaaaggccaaagtctaaaaatacccgccaaataatcacacacgcccagcacacgcccagaaaccggtgacacactcaaaaaaatacgcgcacttcctcaaacgcccaaaactgccgtcatttccgggttcccacgctacgtcatcaaaacacgactttcaaattccgtcgaccgttaaaaacgtcacccgccccgcccctaacggtcgcccgtctctcagccaatcagcgccccgcatccccaaattcaaacacctcatttgcatattaacgcgcacaaaaagtttgaggtatattattgatgatgg

SEQ ID NO: 13 - DNA, 30684 bp, Artificial Sequence
  Description of Artificial Sequence: Synthetic polynucleotide
ccatcttcaataatatacctcaaactttttgtgcgcgttaatatgcaaatgaggcgtttgaatttggggaggaagggcggtgattggtcgagggatgagcgaccgttaggggcggggcgagtgacgttttgatgacgtggttgcgaggaggagccagtttgcaagttctcgtgggaaaagtgacgtcaaacgaggtgtggtttgaacacggaaatactcaattttcccgcgctctctgacaggaaatgaggtgtttctgggcggatgcaagtgaaaacgggccattttcgcgcgaaaactgaatgaggaagtgaaaatctgagtaatttcgcgtttatggcagggaggagtatttgccgagggccgagtagactttgaccgattacgtgggggtttcgattaccgtgtttttcacctaaatttccgcgtacggtgtcaaagtccggtgtttttacgtaggtgtcagctgatcgccagggtatttaaacctgcgctctccagtcaagaggccactcttgagtgccagcgagaagagttttctcctccgcgccgcgagtcagatctacactttgaaagtagggataacagggtaatgacattgattattgactagttgttaatagtaatcaattacggggtcattagttcatagcccatatatggagttccgcgttacataacttacggtaaatggcccgcctggctgaccgcccaacgacccccgcccattgacgtcaataatgacgtatgttcccatagtaacgccaatagggactttccattgacgtcaatgggtggagtatttacggtaaactgcccacttggcagtacatcaagtgtatcatatgccaagtccgccccctattgacgtcaatgacggtaaatggcccgcctggcattatgcccagtacatgaccttacgggactttcctacttggcagtacatctacgtattagtcatcgctattaccatggtgatgcggttttggcagtacaccaatgggcgtggatagcggtttgactcacggggatttccaagtctccaccccattgacgtcaatgggagtttgttttggcaccaaaatcaacgggactttccaaaatgtcgtaataaccccgccccgttgacgcaaatgggcggtaggcgtgtacggtgggaggtctatataagcagagctcgtttagtgaaccgtcagatcgcctggaacgccatccacgctgttttgacctccatagaagacagcgatcgcgccaccatggtgagcaagggcgaggagctgttcaccggggtggtgcccatcctggtcgagctggacggcgacgtaaacggccacaagttcagcgtgtccggcgagggcgagggcgatgccacctacggcaagctgaccctgaagttcatctgcaccaccggcaagctgcccgtgccctggcccaccctcgtgaccaccctgacctacggcgtgcagtgcttcagccgctaccccgaccacatgaagcagcacgacttcttcaagtccgccatgcccgaaggctacgtccaggagcgcaccatcttcttcaaggacgacggcaactacaagacccgcgccgaggtgaagttcgagggcgacaccctggtgaaccgcatcgagctgaagggcatcgacttcaaggaggacggcaacatcctggggcacaagctggagtacaactacaacagccacaacgtctatatcatggccgacaagcagaagaacggcatcaaggtgaacttcaagatccgccacaacatcgaggacggcagcgtgcagctcgccgaccactaccagcagaacacccccatcggcgacggccccgtgctgctgcccgacaaccactacctgagcacccagtccgccctgagcaaagaccccaacgagaagcgcgatcacatggtcctgctggagttcgtgaccgccgccgggatcactctcggcatggacgagctttacaagtagtgagtttaaactcccatttaaatgtgagggttaatgcttcgagcagacatgataagatacattgatgagtttggacaaaccacaactagaatgcagtgaaaaaaatgctttatttgtgaaatttgtgatgctattgctttatttgtaaccattataagctgcaataaacaagttaacaacaacaattgcattcattttatgtttcaggttcagggggagatgtgggaggttttttaaagcaagtaaaacctctacaaatgtggtaaaataactataacggtcctaaggtagcgagtgagtagtgttctggggcgggggaggacctgcatgagggccagaataactgaaatctgtgcttttctgtgtgttgcagcagcatgagcggaagcggctcctttgagggaggggtattcagcccttatctgacggggcgtctcccctcctgggcgggagtgcgtcagaatgtgatgggatccacggtggacggccggcccgtgcagcccgcgaactcttcaaccctgacctatgcaaccctgagctcttcgtcgttggacgcagctgccgccgcagctgctgcatctgccgccagcgccgtgcgcggaatggccatgggcgccggctactacggcactctggtggccaactcgagttccaccaataatcccgccagcctgaacgaggagaagctgttgctgctgatggcccagctcgaggccttgacccagcgcctgggcgagctgacccagcaggtggctcagctgcaggagcagacgcgggccgcggttgccacggtgaaatccaaataaaaaatgaatcaataaataaacggagacggttgttgattttaacacagagtctgaatctttatttgatttttcgcgcgcggtaggccctggaccaccggtctcgatcattgagcacccggtggatcttttccaggacccggtagaggtgggcttggatgttgaggtacatgggcatgagcccgtcccgggggtggaggtagctccattgcagggcctcgtgctcgggggtggtgttgtaaatcacccagtcatagcaggggcgcagggcatggtgttgcacaatatctttgaggaggagactgatggccacgggcagccctttggtgtaggtgtttacaaatctgttgagctgggagggatgcatgcggggggagatgaggtgcatcttggcctggatcttgagattggcgatgttaccgcccagatcccgcctggggttcatgttgtgcaggaccaccagcacggtgtatccggtgcacttggggaatttatcatgcaacttggaagggaaggcgtgaaagaatttggcgacgcctttgtgcccgcccaggttttccatgcactcatccatgatgatggcgatgggcccgtgggcggcggcctgggcaaagacgtttcgggggtcggacacatcatagttgtggtcctgggtgaggtcatcataggccattttaatgaatttggggcggagggtgccggactgggggacaaaggtaccctcgatcccgggggcgtagttcccctcacagatctgcatctcccaggctttgagctcggagggggggatcatgtccacctgcggggcgataaagaacacggtttccggggcgggggagatgagctgggccgaaagcaagttccggagcagctgggacttgccgcagccggtggggccgtagatgaccccgatgaccggctgcaggtggtagttgagggagagacagctgccgtcctcccggaggaggggggccacctcgttcatcatctcgcgcacgtgcatgttctcgcgcaccagttccgccaggaggcgctctccccccagggataggagctcctggagcgaggcgaagtttttcagcggcttgagtccgtcggccatgggcattttggagagggtttgttgcaagagttccaggcggtcccagagctcggtgatgtgctctacggcatctcgatccagcagacctcctcgtttcgcgggttgggacggctgcgggagtagggcaccagacgatgggcgtccagcgcagccagggtccggtccttccagggtcgcagcgtccgcgtcagggtggtctccgtcacggtgaaggggtgcgcgccgggctgggcgcttgcgagggtgcgcttcaggctcatccggctggtcgaaaaccgctcccgatcggcgccctgcgcgtcggccaggtagcaattgaccatgagttcgtagttgagcgcctcggccgcgtggcctttggcgcggagcttacctttggaagtctgcccgcaggcgggacagaggagggacttgagggcgtagagcttgggggcgaggaagacggactcgggggcgtaggcgtccgcgccgcagtgggcgcagacggtctcgcactccacgagccaggtgaggtcgggctggtcggggtcaaaaaccagtttcccgccgttctttttgatgcgtttcttacctttggtctccatgagctcgtgtccccgctgggtgacaaagaggctgtccgtgtccccgtagaccgactttatgggccggtcctcgagcggtgtgccgcggtcctcctcgtagaggaaccccgcccactccgagacgaaagcccgggtccaggccagcacgaaggaggccacgtgggacgggtagcggtcgttgtccaccagcgggtccaccttttccagggtatgcaaacacatgtccccctcgtccacatccaggaaggtgattggcttgtaagtgtaggccacgtgaccgggggtcccggccgggggggtataaaagggtgcgggtccctgctcgtcctcactgtcttccggatcgctgtccaggagcgccagctgttggggtaggtattccctctcgaaggcgggcatgacctcggcactcaggttgtcagtttctagaaacgaggaggatttgatattgacggtgccggcggagatgcctttcaagagcccctcgtccatctggtcagaaaagacgatctttttgttgtcgagcttggtggcgaaggagccgtagagggcgttggagaggagcttggcgatggagcgcatggtctggtttttttccttgtcggcgcgctccttggcggcgatgttgagctgcacgtactcgcgcgccacgcacttccattcggggaagacggtggtcagctcgtcgggcacgattctgacctgccagccccgattatgcagggtgatgaggtccacactggtggccacctcgccgcgcaggggctcattagtccagcagaggcgtccgcccttgcgcgagcagaaggggggcagggggtccagcatgacctcgtcgggggggtcggcatcgatggtgaagatgccgggcaggaggtcggggtcaaagtagctgatggaagtggccagatcgtccagggcagcttgccattcgcgcacggccagcgcgcgctcgtagggactgaggggcgtgccccagggcatgggatgggtaagcgcggaggcgtacatgccgcagatgtcgtagacgtagaggggctcctcgaggatgccgatgtaggtggggtagcagcgccccccgcggatgctggcgcgcacgtagtcatacagctcgtgcgagggggcgaggagccccgggcccaggttggtgcgactgggcttttcggcgcggtagacgatctggcggaaaatggcatgcgagttggaggagatggtgggcctttggaagatgttgaagtgggcgtggggcagtccgaccgagtcgcggatgaagtgggcgtaggagtcttgcagcttggcgacgagctcggcggtgactaggacgtccagagcgcagtagtcgagggtctcctggatgatgtcatacttgagctgtcccttttgtttccacagctcgcggttgagaaggaactcttcgcggtccttccagtactcttcgagggggaacccgtcctgatctgcacggtaagagcctagcatgtagaactggttgacggccttgtaggcgcagcagcccttctccacggggagggcgtaggcctgggcggccttgcgcagggaggtgtgcgtgagggcgaaagtgtccctgaccatgaccttgaggaactggtgcttgaagtcgatatcgtcgcagcccccctgctcccagagctggaagtccgtgcgcttcttgtaggcggggttgggcaaagcgaaagtaacatcgttgaagaggatcttgcccgcgcggggcataaagttgcgagtgatgcggaaaggttggggcacctcggcccggttgttgatgacctgggcggcgagcacgatctcgtcgaagccgttgatgttgtggcccacgatgtagagttccacgaatcgcggacggcccttgacgtggggcagtttcttgagctcctcgtaggtgagctcgtcggggtcgctgagcccgtgctgctcgagcgcccagtcggcgagatgggggttggcgcggaggaaggaagtccagagatccacggccagggcggtttgcagacggtcccggtactgacggaactgctgcccgacggccattttttcgggggtgacgcagtagaaggtgcgggggtccccgtgccagcgatcccatttgagctggagggcgagatcgagggcgagctcgacgagccggtcgtccccggagagtttcatgaccagcatgaaggggacgagctgcttgccgaaggaccccatccaggtgtaggtttccacatcgtaggtgaggaagagcctttcggtgcgaggatgcgagccgatggggaagaactggatctcctgccaccaattggaggaatggctgttgatgtgatggaagtagaaatgccgacggcgcgccgaacactcgtgcttgtgtttatacaagcggccacagtgctcgcaacgctgcacgggatgcacgtgctgcacgagctgtacctgagttcctttgacgaggaatttcagtgggaagtggagtcgtggcgcctgcatctcgtgctgtactacgtcgtggtggtcggcctggccctcttctgcctcgatggtggtcatgctgacgagcccgcgcgggaggcaggtccagacctcggcgcgagcgggtcggagagcgaggacgagggcgcgcaggccggagctgtccagggtcctgagacgctgcggagtcaggtcagtgggcagcggcggcgcgcggttgacttgcaggagtttttccagggcgcgcgggaggtccagatggtacttgatctccaccgcgccattggtggcgacgtcgatggcttgcagggtcccgtgcccctggggtgtgaccaccgtcccccgtttcttcttgggcggctggggcgacgggggcggtgcctcttccatggttagaagcggcggcgaggacgcgcgccgggcggcaggggcggctcggggcccggaggcaggggcggcaggggcacgtcggcgccgcgcgcgggtaggttctggtactgcgcccggagaagactggcgtgagcgacgacgcgacggttgacgtcctggatctgacgcctctgggtgaaggccacgggacccgtgagtttgaacctgaaagagagttcgacagaatcaatctcggtatcgttgacggcggcctgccgcaggatctcttgcacgtcgcccgagttgtcctggtaggcgatctcggtcatgaactgctcgatctcctcctcttgaaggtctccgcggccggcgcgctccacggtggccgcgaggtcgttggagatgcggcccatgagctgcgagaaggcgttcatgcccgcctcgttccagacgcggctgtagaccacgacgccctcgggatcgcgggcgcgcatgaccacctgggcgaggttgagctccacgtggcgcgtgaagaccgcgtagttgcagaggcgctggtagaggtagttgagcgtggtggcgatgtgctcggtgacgaagaaatacatgatccagcggcggagcggcatctcgctgacgtcgcccagcgcctccaaacgttccatggcctcgtaaaagtccacggcgaagttgaaaaactgggagttgcgcgccgagacggtcaactcctcctccagaagacggatgagctcggcgatggtggcgcgcacctcgcgctcgaaggcccccgggagttcctccacttcctcttcttcctcctccactaacatctcttctacttcctcctcaggcggcagtggtggcgggggagggggcctgcgtcgccggcggcgcacgggcagacggtcgatgaagcgctcgatggtctcgccgcgccggcgtcgcatggtctcggtgacggcgcgcccgtcctcgcggggccgcagcgtgaagacgccgccgcgcatctccaggtggccgggggggtccccgttgggcagggagagggcgctgacgatgcatcttatcaattgccccgtagggactccgcgcaaggacctgagcgtctcgagatccacgggatctgaaaaccgctgaacgaaggcttcgagccagtcgcagtcgcaaggtaggctgagcacggtttcttctggcgggtcatgttggttgggagcggggcgggcgatgctgctggtgatgaagttgaaataggcggttctgagacggcggatggtggcgaggagcaccaggtctttgggcccggcttgctggatgcgcagacggtcggccatgccccaggcgtggtcctgacacctggccaggtccttgtagtagtcctgcatgagccgctccacgggcacctcctcctcgcccgcgcggccgtgcatgcgcgtgagcccgaagccgcgctggggctggacgagcgccaggtcggcgacgacgcgctcggcgaggatggcttgctggatctgggtgagggtggtctggaagtcatcaaagtcgacgaagcggtggtaggctccggtgttgatggtgtaggagcagttggccatgacggaccagttgacggtctggtggcccggacgcacgagctcgtggtacttgaggcgcgagtaggcgcgcgtgtcgaagatgtagtcgttgcaggtgcgcaccaggtactggtagccgatgaggaagtgcggcggcggctggcggtagagcggccatcgctcggtggcgggggcgccgggcgcgaggtcctcgagcatggtgcggtggtagccgtagatgtacctggacatccaggtgatgccggcggcggtggtggaggcgcgcgggaactcgcggacgcggttccagatgttgcgcagcggcaggaagtagttcatggtgggcacggtctggcccgtgaggcgcgcgcagtcgtggatgctctatacgggcaaaaacgaaagcggtcagcggctcgactccgtggcctggaggctaagcgaacgggttgggctgcgcgtgtaccccggttcgaatctcgaatcaggctggagccgcagctaacgtggtattggcactcccgtctcgacccaagcctgcaccaaccctccaggatacggaggcgggtcgttttgcaacttttttttggaggccggatgagactagtaagcgcggaaagcggccgaccgcgatggctcgctgccgtagtctggagaagaatcgccagggttgcgttgcggtgtgccccggttcgaggccggccggattccgcggctaacgagggcgtggctgccccgtcgtttccaagaccccatagccagccgacttctccagttacggagcgagcccctcttttgttttgtttgtttttgccagatgcatcccgtactgcggcagatgcgcccccaccaccctccaccgcaacaacagccccctccacagccggcgcttctgcccccgccccagcagcaacttccagccacgaccgccgcggccgccgtgagcggggctggacagagttatgatcaccagctggccttggaagagggcgaggggctggcgcgcctgggggcgtcgtcgccggagcggcacccgcgcgtgcagatgaaaagggacgctcgcgaggcctacgtgcccaagcagaacctgttcagagacaggagcggcgaggagcccgaggagatgcgcgcggcccggttccacgcggggcgggagctgcggcgcggcctggaccgaaagagggtgctgagggacgaggatttcgaggcggacgagctgacggggatcagccccgcgcgcgcgcacgtggccgcggccaacctggtcacggcgtacgagcagaccgtgaaggaggagagcaacttccaaaaatccttcaacaaccacgtgcgcaccctgatcgcgcgcgaggaggtgaccctgggcctgatgcacctgtgggacctgctggaggccatcgtgcagaaccccaccagcaagccgctgacggcgcagctgttcctggtggtgcagcatagtcgggacaacgaagcgttcagggaggcgctgctgaatatcaccgagcccgagggccgctggctcctggacctggtgaacattctgcagagcatcgtggtgcaggagcgcgggctgccgctgtccgagaagctggcggccatcaacttctcggtgctgagtttgggcaagtactacgctaggaagatctacaagaccccgtacgtgcccatagacaaggaggtgaagatcgacgggttttacatgcgcatgaccctgaaagtgctgaccctgagcgacgatctgggggtgtaccgcaacgacaggatgcaccgtgcggtgagcgccagcaggcggcgcgagctgagcgaccaggagctgatgcatagtctgcagcgggccctgaccggggccgggaccgagggggagagctactttgacatgggcgcggacctgcactggcagcccagccgccgggccttggaggcggcggcaggaccctacgtagaagaggtggacgatgaggtggacgaggagggcgagtacctggaagactgatggcgcgaccgtatttttgctagatgcaacaacaacagccacctcctgatcccgcgatgcgggcggcgctgcagagccagccgtccggcattaactcctcggacgattggacccaggccatgcaacgcatcatggcgctgacgacccgcaaccccgaagcctttagacagcagccccaggccaaccggctctcggccatcctggaggccgtggtgccctcgcgctccaaccccacgcacgagaaggtcctggccatcgtgaacgcgctggtggagaacaaggccatccgcggcgacgaggccggcctggtgtacaacgcgctgctggagcgcgtggcccgctacaacagcaccaacgtgcagaccaacctggaccgcatggtgaccgacgtgcgcgaggccgtggcccagcgcgagcggttccaccgcgagtccaacctgggatccatggtggcgctgaacgccttcctcagcacccagcccgccaacgtgccccggggccaggaggactacaccaacttcatcagcgccctgcgcctgatggtgaccgaggtgccccagagcgaggtgtaccagtccgggccggactacttcttccagaccagtcgccagggcttgcagaccgtgaacctgagccaggctttcaagaacttgcagggcctgtggggcgtgcaggccccggtcggggaccgcgcgacggtgtcgagcctgctgacgccgaactcgcgcctgctgctgctgctggtggcccccttcacggacagcggcagcatcaaccgcaactcgtacctgggctacctgattaacctgtaccgcgaggccatcggccaggcgcacgtggacgagcagacctaccaggagatcacccacgtgagccgcgccctgggccaggacgacccgggcaacctggaagccaccctgaactttttgctgaccaaccggtcgcagaagatcccgccccagtacgcgctcagcaccgaggaggagcgcatcctgcgttacgtgcagcagagcgtgggcctgttcctgatgcaggagggggccacccccagcgccgcgctcgacatgaccgcgcgcaacatggagcccagcatgtacgccagcaaccgcccgttcatcaataaactgatggactacttgcatcgggcggccgccatgaactctgactatttcaccaacgccatcctgaatccccactggctcccgccgccggggttctacacgggcgagtacgacatgcccgaccccaatgacgggttcctgtgggacgatgtggacagcagcgtgttctccccccgaccgggtgctaacgagcgccccttgtggaagaaggaaggcagcgaccgacgcccgtcctcggcgctgtccggccgcgagggtgctgccgcggcggtgcccgaggccgccagtcctttcccgagcttgcccttctcgctgaacagtatccgcagcagcgagctgggcaggatcacgcgcccgcgcttgctgggcgaagaggagtacttgaatgactcgctgttgagacccgagcgggagaagaacttccccaataacgggatagaaagcctggtggacaagatgagccgctggaagacgtatgcgcaggagcacagggacgatccccgggcgtcgcagggggccacgagccggggcagcgccgcccgtaaacgccggtggcacgacaggcagcggggacagatgtgggacgatgaggactccgccgacgacagcagcgtgttggacttgggtgggagtggtaacccgttcgctcacctgcgcccccgtatcgggcgcatgatgtaagagaaaccgaaaataaatgatactcaccaaggccatggcgaccagcgtgcgttcgtttcttctctgttgttgttgtatctagtatgatgaggcgtgcgtacccggagggtcctcctccctcgtacgagagcgtgatgcagcaggcgatggcggcggcggcgatgcagcccccgctggaggctccttacgtgcccccgcggtacctggcgcctacggaggggcggaacagcattcgttactcggagctggcacccttgtacgataccacccggttgtacctggtggacaacaagtcggcggacatcgcctcgctgaactaccagaacgaccacagcaacttcctgaccaccgtggtgcagaacaatgacttcacccccacggaggccagcacccagaccatcaactttgacgagcgctcgcggtggggcggccagctgaaaaccatcatgcacaccaacatgcccaacgtgaacgagttcatgtacagcaacaagttcaaggcgcgggtgatggtctcccgcaagacccccaatggggtgacagtgacagaggattatgatggtagtcaggatgagctgaagtatgaatgggtggaatttgagctgcccgaaggcaacttctcggtgaccatgaccatcgacctgatgaacaacgccatcatcgacaattacttggcggtggggcggcagaacggggtgctggagagcgacatcggcgtgaagttcgacactaggaacttcaggctgggctgggaccccgtgaccgagctggtcatgcccggggtgtacaccaacgaggctttccatcccgatattgtcttgctgcccggctgcggggtggacttcaccgagagccgcctcagcaacctgctgggcattcgcaagaggcagcccttccaggaaggcttccagatcatgtacgaggatctggaggggggcaacatccccgcgctcctggatgtcgacgcctatgagaaaagcaaggaggatgcagcagctgaagcaactgcagccgtagctaccgcctctaccgaggtcaggggcgataattttgcaagcgccgcagcagtggcagcggccgaggcggctgaaaccgaaagtaagatagtcattcagccggtggagaaggatagcaagaacaggagctacaacgtactaccggacaagataaacaccgcctaccgcagctggtacctagcctacaactatggcgaccccgagaagggcgtgcgctcctggacgctgctcaccacctcggacgtcacctgcggcgtggagcaagtctactggtcgctgcccgacatgatgcaagacccggtcaccttccgctccacgcgtcaagttagcaactacccggtggtgggcgccgagctcctgcccgtctactccaagagcttcttcaacgagcaggccgtctactcgcagcagctgcgcgccttcacctcgcttacgcacgtcttcaaccgcttccccgagaaccagatcctcgtccgcccgcccgcgcccaccattaccaccgtcagtgaaaacgttcctgctctcacagatcacgggaccctgccgctgcgcagcagtatccggggagtccagcgcgtgaccgttactgacgccagacgccgcacctgcccctacgtctacaaggccctgggcatagtcgcgccgcgcgtcctctcgagccgcaccttctaaatgtccattctcatctcgcccagtaataacaccggttggggcctgcgcgcgcccagcaagatgtacggaggcgctcgccaacgctccacgcaacaccccgtgcgcgtgcgcgggcacttccgcgctccctggggcgccctcaagggccgcgtgcggtcgcgcaccaccgtcgacgacgtgatcgaccaggtggtggccgacgcgcgcaactacacccccgccgccgcgcccgtctccaccgtggacgccgtcatcgacagcgtggtggccgacgcgcgccggtacgcccgcgccaagagccggcggcggcgcatcgcccggcggcaccggagcacccccgccatgcgcgcggcgcgagccttgctgcgcagggccaggcgcacgggacgcagggccatgctcagggcggccagacgcgcggcttcaggcgccagcgccggcaggacccggagacgcgcggccacggcggcggcagcggccatcgccagcatgtcccgcccgcggcgagggaacgtgtactgggtgcgcgacgccgccaccggtgtgcgcgtgcccgtgcgcacccgcccccctcgcacttgaagatgttcacttcgcgatgttgatgtgtcccagcggcgaggaggatgtccaagcgcaaattcaaggaagagatgctccaggtcatcgcgcctgagatctacggccctgcggtggtgaaggaggaaagaaagccccgcaaaatcaagcgggtcaaaaaggacaaaaaggaagaagaaagtgatgtggacggattggtggagtttgtgcgcgagttcgccccccggcggcgcgtgcagtggcgcgggcggaaggtgcaaccggtgctgagacccggcaccaccgtggtcttcacgcccggcgagcgctccggcaccgcttccaagcgctcctacgacgaggtgtacggggatgatgatattctggagcaggcggccgagcgcctgggcgagtttgcttacggcaagcgcagccgttccgcaccgaaggaagaggcggtgtccatcccgctggaccacggcaaccccacgccgagcctcaagcccgtgaccttgcagcaggtgctgccgaccgcggcgccgcgccgggggttcaagcgcgagggcgaggatctgtaccccaccatgcagctgatggtgcccaagcgccagaagctggaagacgtgctggagaccatgaaggtggacccggacgtgcagcccgaggtcaaggtgcggcccatcaagcaggtggccccgggcctgggcgtgcagaccgtggacatcaagattcccacggagcccatggaaacgcagaccgagcccatgatcaagcccagcaccagcaccatggaggtgcagacggatccctggatgccatcggctcctagtcgaagaccccggcgcaagtacggcgcggccagcctgctgatgcccaactacgcgctgcatccttccatcatccccacgccgggctaccgcggcacgcgcttctaccgcggtcataccagcagccgccgccgcaagaccaccactcgccgccgccgtcgccgcaccgccgctgcaaccacccctgccgccctggtgcggagagtgtaccgccgcggccgcgcacctctgaccctgccgcgcgcgcgctaccacccgagcatcgccatttaaactttcgcctgctttgcagatcaatggccctcacatgccgccttcgcgttcccattacgggctaccgaggaagaaaaccgcgccgtagaaggctggcggggaacgggatgcgtcgccaccaccaccggcggcggcgcgccatcagcaagcggttggggggaggcttcctgcccgcgctgatccccatcatcgccgcggcgatcggggcgatccccggcattgcttccgtggcggtgcaggcctctcagcgccactgagacacacttggaaacatcttgtaataaaccaatggactctgacgctcctggtcctgtgatgtgttttcgtagacagatggaagacatcaatttttcgtccctggctccgcgacacggcacgcggccgttcatgggcacctggagcgacatcggcaccagccaactgaacgggggcgccttcaattggagcagtctctggagcgggcttaagaatttcgggtccacgcttaaaacctatggcagcaaggcgtggaacagcaccacagggcaggcgctgagggataagctgaaagagcagaacttccagcagaaggtggtcgatgggctcgcctcgggcatcaacggggtggtggacctggccaaccaggccgtgcagcggcagatcaacagccgcctggacccggtgccgcccgccggctccgtggagatgccgcaggtggaggaggagctgcctcccctggacaagcggggcgagaagcgaccccgccccgatgcggaggagacgctgctgacgcacacggacgagccgcccccgtacgaggaggcggtgaaactgggtctgcccaccacgcggcccatcgcgcccctggccaccggggtgctgaaacccgaaaagcccgcgaccctggacttgcctcctccccagccttcccgcccctctacagtggctaagcccctgccgccggtggccgtggcccgcgcgcgacccgggggcaccgcccgccctcatgcgaactggcagagcactctgaacagcatcgtgggtctgggagtgcagagtgtgaagcgccgccgctgctattaaacctaccgtagcgcttaacttgcttgtctgtgtgtgtatgtattatgtcgccgccgccgctgtccaccagaaggaggagtgaagaggcgcgtcgccgagttgcaagatggccaccccatcgatgctgccccagtgggcgtacatgcacatcgccggacaggacgcttcggagtacctgagtccgggtctggtgcagtttgcccgcgccacagacacctacttcagtctggggaacaagtttaggaaccccacggtggcgcccacgcacgatgtgaccaccgaccgcagccagcggctgacgctgcgcttcgtgcccgtggaccgcgaggacaacacctactcgtacaaagtgcgctacacgctggccgtgggcgacaaccgcgtgctggacatggccagcacctactttgacatccgcggcgtgctggatcggggccctagcttcaaaccctactccggcaccgcctacaacagtctggcccccaagggagcacccaacacttgtcagtggacatataaagccgatggtgaaactgccacagaaaaaacctatacatatggaaatgcacccgtgcagggcattaacatcacaaaagatggtattcaacttggaactgacaccgatgatcagccaatctacgcagataaaacctatcagcctgaacctcaagtgggtgatgctgaatggcatgacatcactggtactgatgaaaagtatggaggcagagctcttaagcctgataccaaaatgaagccttgttatggttcttttgccaagcctactaataaagaaggaggtcaggcaaatgtgaaaacaggaacaggcactactaaagaatatgacatagacatggctttctttgacaacagaagtgcggctgctgctggcctagctccagaaattgttttgtatactgaaaatgtggatttggaaactccagatacccatattgtatacaaagcaggcacagatgacagcagctcttctattaatttgggtcagcaagccatgcccaacagacctaactacattggtttcagagacaactttatcgggctcatgtactacaacagcactggcaatatgggggtgctggccggtcaggcttctcagctgaatgctgtggttgacttgcaagacagaaacaccgagctgtcctaccagctcttgcttgactctctgggtgacagaacccggtatttcagtatgtggaatcaggcggtggacagctatgatcctgatgtgcgcattattgaaaatcatggtgtggaggatgaacttcccaactattgtttccctctggatgctgttggcagaacagatacttatcagggaattaaggctaatggaactgatcaaaccacatggaccaaagatgacagtgtcaatgatgctaatgagataggcaagggtaatccattcgccatggaaatcaacatccaagccaacctgtggaggaacttcctctacgccaacgtggccctgtacctgcccgactcttacaagtacacgccggccaatgttaccctgcccaccaacaccaacacctacgattacatgaacggccgggtggtggcgccctcgctggtggactcctacatcaacatcggggcgcgctggtcgctggatcccatggacaacgtgaaccccttcaaccaccaccgcaatgcggggctgcgctaccgctccatgctcctgggcaacgggcgctacgtgcccttccacatccaggtgccccagaaatttttcgccatcaagagcctcctgctcctgcccgggtcctacacctacgagtggaacttccgcaaggacgtcaacatgatcctgcagagctccctcggcaacgacctgcgcacggacggggcctccatctccttcaccagcatcaacctctacgccaccttcttccccatggcgcacaacacggcctccacgctcgaggccatgctgcgcaacgacaccaacgaccagtccttcaacgactacctctcggcggccaacatgctctaccccatcccggccaacgccaccaacgtgcccatctccatcccctcgcgcaactgggccgccttccgcggctggtccttcacgcgtctcaagaccaaggagacgccctcgctgggctccgggttcgacccctacttcgtctactcgggctccatcccctacctcgacggcaccttctacctcaaccacaccttcaagaaggtctccatcaccttcgactcctccgtcagctggcccggcaacgaccggctcctgacgcccaacgagttcgaaatcaagcgcaccgtcgacggcgagggctacaacgtggcccagtgcaacatgaccaaggactggttcctggtccagatgctggcccactacaacatcggctaccagggcttctacgtgcccgagggctacaaggaccgcatgtactccttcttccgcaacttccagcccatgagccgccaggtggtggacgaggtcaactacaaggactaccaggccgtcaccctggcctaccagcacaacaactcgggcttcgtcggctacctcgcgcccaccatgcgccagggccagccctaccccgccaactacccctacccgctcatcggcaagagcgccgtcaccagcgtcacccagaaaaagttcctctgcgacagggtcatgtggcgcatccccttctccagcaacttcatgtccatgggcgcgctcaccgacctcggccagaacatgctctatgccaactccgcccacgcgctagacatgaatttcgaagtcgaccccatggatgagtccacccttctctatgttgtcttcgaagtcttcgacgtcgtccgagtgcaccagccccaccgcggcgtcatcgaggccgtctacctgcgcacccccttctcggccggtaacgccaccacctaagctcttgcttcttgcaagccatggccgcgggctccggcgagcaggagctcagggccatcatccgcgacctgggctgcgggccctacttcctgggcaccttcgataagcgcttcccgggattcatggccccgcacaagctggcctgcgccatcgtcaacacggccggccgcgagaccgggggcgagcactggctggccttcgcctggaacccgcgctcgaacacctgctacctcttcgaccccttcgggttctcggacgagcgcctcaagcagatctaccagttcgagtacgagggcctgctgcgccgcagcgccctggccaccgaggaccgctgcgtcaccctggaaaagtccacccagaccgtgcagggtccgcgctcggccgcctgcgggctcttctgctgcatgttcctgcacgccttcgtgcactggcccgaccgccccatggacaagaaccccaccatgaacttgctgacgggggtgcccaacggcatgctccagtcgccccaggtggaacccaccctgcgccgcaaccaggaggcgctctaccgcttcctcaactcccactccgcctactttcgctcccaccgcgcgcgcatcgagaaggccaccgccttcgaccgcatgaatcaagacatgtaaaccgtgtgtgtatgttaaatgtctttaataaacagcactttcatgttacacatgcatctgagatgatttatttagaaatcgaaagggttctgccgggtctcggcatggcccgcgggcagggacacgttgcggaactggtacttggccagccacttgaactcggggatcagcagtttgggcagcggggtgtcggggaaggagtcggtccacagcttccgcgtcagttgcagggcgcccagcaggtcgggcgcggagatcttgaaatcgcagttgggacccgcgttctgcgcgcgggagttgcggtacacggggttgcagcactggaacaccatcagggccgggtgcttcacgctcgccagcaccgtcgcgtcggtgatgctctccacgtcgaggtcctcggcgttggccatcccgaagggggtcatcttgcaggtctgccttcccatggtgggcacgcacccgggcttgtggttgcaatcgcagtgcagggggatcagcatcatctgggcctggtcggcgttcatccccgggtacatggccttcatgaaagcctccaattgcctgaacgcctgctgggccttggctccctcggtgaagaagaccccgcaggacttgctagagaactggttggtggcgcacccggcgtcgtgcacgcagcagcgcgcgtcgttgttggccagctgcaccacgctgcgcccccagcggttctgggtgatcttggcccggtcggggttctccttcagcgcgcgctgcccgttctcgctcgccacatccatctcgatcatgtgctccttctggatcatggtggtcccgtgcaggcaccgcagcttgccctcggcctcggtgcacccgtgcagccacagcgcgcacccggtgcactcccagttcttgtgggcgatctgggaatgcgcgtgcacgaagccctgcaggaagcggcccatcatggtggtcagggtcttgttgctagtgaaggtcagcggaatgccgcggtgctcctcgttgatgtacaggtggcagatgcggcggtacacctcgccctgctcgggcatcagctggaagttggctttcaggtcggtctccacgcggtagcggtccatcagcatagtcatgatttccatacccttctcccaggccgagacgatgggcaggctcatagggttcttcaccatcatcttagcgctagcagccgcggccagggggtcgctctcgtccagggtctcaaagctccgcttgccgtccttctcggtgatccgcaccggggggtagctgaagcccacggccgccagctcctcctcggcctgtctttcgtcctcgctgtcctggctgacgtcctgcaggaccacatgcttggtcttgcggggtttcttcttgggcggcagcggcggcggagatgttggagatggcgagggggagcgcgagttctcgctcaccactactatctcttcctcttcttggtccgaggccacgcggcggtaggtatgtctcttcgggggcagaggcggaggcgacgggctctcgccgccgcgacttggcggatggctggcagagccccttccgcgttcgggggtgcgctcccggcggcgctctgactgacttcctccgcggccggccattgtgttctcctagggaggaacaacaagcatggagactcagccatcgccaacctcgccatctgcccccaccgccgacgagaagcagcagcagcagaatgaaagcttaaccgccccgccgcccagccccgccacctccgacgcggccgtcccagacatgcaagagatggaggaatccatcgagattgacctgggctatgtgacgcccgcggagcacgaggaggagctggcagtgcgcttttcacaagaagagatacaccaagaacagccagagcaggaagcagagaatgagcagagtcaggctgggctcgagcatgacggcgactacctccacctgagcgggggggaggacgcgctcatcaagcatctggcccggcaggccaccatcgtcaaggatgcgctgctcgaccgcaccgaggtgcccctcagcgtggaggagctcagccgcgcctacgagttgaacctcttctcgccgcgcgtgccccccaagcgccagcccaatggcacctgcgagcccaacccgcgcctcaacttctacccggtcttcgcggtgcccgaggccctggccacctaccacatctttttcaagaaccaaaagatccccgtctcctgccgcgccaaccgcacccgcgccgacgcccttttcaacctgggtcccggcgcccgcctacctgatatcgcctccttggaagaggttcccaagatcttcgagggtctgggcagcgacgagactcgggccgcgaacgctctgcaaggagaaggaggagagcatgagcaccacagcgccctggtcgagttggaaggcgacaacgcgcggctggcggtgctcaaacgcacggtcgagctgacccatttcgcctacccggctctgaacctgccccccaaagtcatgagcgcggtcatggaccaggtgctcatcaagcgcgcgtcgcccatctccgaggacgagggcatgcaagactccgaggagggcaagcccgtggtcagcgacgagcagctggcccggtggctgggtcctaatgctagtccccagagtttggaagagcggcgcaaactcatgatggccgtggtcctggtgaccgtggagctggagtgcctgcgccgcttcttcgccgacgcggagaccctgcgcaaggtcgaggagaacctgcactacctcttcaggcacgggttcgtgcgccaggcctgcaagatctccaacgtggagctgaccaacctggtctcctacatgggcatcttgcacgagaaccgcctggggcagaacgtgctgcacaccaccctgcgcggggaggcccggcgcgactacatccgcgactgcgtctacctctacctctgccacacctggcagacgggcatgggcgtgtggcagcagtgtctggaggagcagaacctgaaagagctctgcaagctcctgcagaagaacctcaagggtctgtggaccgggttcgacgagcgcaccaccgcctcggacctggccgacctcattttccccgagcgcctcaggctgacgctgcgcaacggcctgcccgactttatgagccaaagcatgttgcaaaactttcgctctttcatcctcgaacgctccggaatcctgcccgccacctgctccgcgctgccctcggacttcgtgccgctgaccttccgcgagtgccccccgccgctgtggagccactgctacctgctgcgcctggccaactacctggcctaccactcggacgtgatcgaggacgtcagcggcgagggcctgctcgagtgccactgccgctgcaacctctgcacgccgcaccgctccctggcctgcaacccccagctgctgagcgagacccagatcatcggcaccttcgagttgcaagggcccagcgaaggcgagggttcagccgccaaggggggtctgaaactcaccccggggctgtggacctcggcctacttgcgcaagttcgtgcccgaggactaccatcccttcgagatcaggttctacgaggaccaatcccatccgcccaaggccgagctgtcggcctgcgtcatcacccagggggcgatcctggcccaattgcaagccatccagaaatcccgccaagaattcttgctgaaaaagggccgcggggtctacctcgacccccagaccggtgaggagctcaaccccggcttcccccaggatgccccgaggaaacaagaagctgaaagtggagctgccgcccgtggaggatttggaggaagactgggagaacagcagtcaggcagaggaggaggagatggaggaagactgggacagcactcaggcagaggaggacagcctgcaagacagtctggaggaagacgaggaggaggcagaggaggaggtggaagaagcagccgccgccagaccgtcgtcctcggcgggggagaaagcaagcagcacggataccatctccgctccgggtcggggtcccgctcgaccacacagtagatgggacgagaccggacgattcccgaaccccaccacccagaccggtaagaaggagcggcagggatacaagtcctggcgggggcacaaaaacgccatcgtctcctgcttgcaggcctgcgggggcaacatctccttcacccggcgctacctgctcttccaccgcggggtgaactttccccgcaacatcttgcattactaccgtcacctccacagcccctactacttccaagaagaggcagcagcagcagaaaaagaccagcagaaaaccagcagctagaaaatccacagcggcggcagcaggtggactgaggatcgcggcgaacgagccggcgcaaacccgggagctgaggaaccggatctttcccaccctctatgccatcttccagcagagtcgggggcaggagcaggaactgaaagtcaagaaccgttctctgcgctcgctcacccgcagttgtctgtatcacaagagcgaagaccaacttcagcgcactctcgaggacgccgaggctctcttcaacaagtactgcgcgctcactcttaaagagtagcccgcgcccgcccagtcgcagaaaaaggcgggaattacgtcacctgtgcccttcgccctagccgcctccacccatcatcatgagcaaagagattcccacgccttacatgtggagctaccagccccagatgggcctggccgccggtgccgcccaggactactccacccgcatgaattggctcagcgccgggcccgcgatgatctcacgggtgaatgacatccgcgcccaccgaaaccagatactcctagaacagtcagcgctcaccgccacgccccgcaatcacctcaatccgcgtaattggcccgccgccctggtgtaccaggaaattccccagcccacgaccgtactacttccgcgagacgcccaggccgaagtccagctgactaactcaggtgtccagctggcgggcggcgccaccctgtgtcgtcaccgccccgctcagggtataaagcggctggtgatccggggcagaggcacacagctcaacgacgaggtggtgagctcttcgctgggtctgcgacctgacggagtcttccaactcgccggatcggggagatcttccttcacgcctcgtcaggccgtcctgactttggagagttcgtcctcgcagccccgctcgggtggcatcggcactctccagttcgtggaggagttcactccctcggtctacttcaaccccttctccggctcccccggccactacccggacgagttcatcccgaacttcgacgccatcagcgagtcggtggacggctacgattgaaactaatcacccccttatccagtgaaataaagatcatattgatgatgattttacagaaataaaaaataatcatttgatttgaaataaagatacaatcatattgatgatttgagtttaacaaaaaaataaagaatcacttacttgaaatctgataccaggtctctgtccatgttttctgccaacaccacttcactcccctcttcccagctctggtactgcaggccccggcgggctgcaaacttcctccacacgctgaaggggatgtcaaattcctcctgtccctcaatcttcattttatcttctatcagatgtccaaaaagcgcgtccgggtggatgatgacttcgaccccgtctacccctacgatgcagacaacgcaccgaccgtgcccttcatcaacccccccttcgtctcttcagatggattccaagagaagcccctgggggtgttgtccctgcgactggccgaccccgtcaccaccaagaacggggaaatcaccctcaagctgggagagggggtggacctcgattcctcgggaaaactcatctccaacacggccaccaaggccgccgcccctctcagtttttccaacaacaccatttcccttaacatggatcaccccttttacactaaagatggaaaattatccttacaagtttctccaccattaaatatactgagaacaagcattctaaacacactagctttaggttttggatcaggtttaggactccgtggctctgccttggcagtacagttagtctctccacttacatttgatactgatggaaacataaagcttaccttagacagaggtttgcatgttacaacaggagatgcaattgaaagcaacataagctgggctaaaggtttaaaatttgaagatggagccatagcaaccaacattggaaatgggttagagtttggaagcagtagtacagaaacaggtgttgatgatgcttacccaatccaagttaaacttggatctggccttagctttgacagtacaggagccataatggctggtaacaaagaagacgataaactcactttgtggacaacacctgatccatcaccaaactgtcaaatactcgcagaaaatgatgcaaaactaacactttgcttgactaaatgtggtagtcaaatactggccactgtgtcagtcttagttgtaggaagtggaaacctaaaccccattactggcaccgtaagcagtgctcaggtgtttctacgttttgatgcaaacggtgttcttttaacagaacattctacactaaaaaaatactgggggtataggcagggagatagcatagatggcactccatataccaatgctgtaggattcatgcccaatttaaaagcttatccaaagtcacaaagttctactactaaaaataatatagtagggcaagtatacatgaatggagatgtttcaaaacctatgcttctcactataaccctcaatggtactgatgacagcaacagtacatattcaatgtcattttcatacacctggactaatggaagctatgttggagcaacatttggggctaactcttataccttctcatacatcgcccaagaatgaacactgtatcccaccctgcatgccaacccttcccaccccactctgtggaacaaactctgaaacacaaaataaaataaagttcaagtgttttattgattcaacagttttacaggattcgagcagttatttttcctccaccctcccaggacatggaatacaccaccctctccccccgcacagccttgaacatctgaatgccattggtgatggacatgcttttggtctccacgttccacacagtttcagagcgagccagtctcgggtcggtcagggagatgaaaccctccgggcactcccgcatctgcacctcacagctcaacagctgaggattgtcctcggtggtcgggatcacggttatctggaagaagcagaagagcggcggtgggaatcatagtccgcgaacgggatcggccggtggtgtcgcatcaggccccgcagcagtcgctgccgccgccgctccgtcaagctgctgctcagggggtccgggtccagggactccctcagcatgatgcccacggccctcagcatcagtcgtctggtgcggcgggcgcagcagcgcatgcggatctcgctcaggtcgctgcagtacgtgcaacacagaaccaccaggttgttcaacagtccatagttcaacacgctccagccgaaactcatcgcgggaaggatgctacccacgtggccgtcgtaccagatcctcaggtaaatcaagtggtgccccctccagaacacgctgcccacgtacatgatctccttgggcatgtggcggttcaccacctcccggtaccacatcaccctctggttgaacatgcagccccggatgatcctgcggaaccacagggccagcaccgccccgcccgccatgcagcgaagagaccccgggtcccggcaatggcaatggaggacccaccgctcgtacccgtggatcatctgggagctgaacaagtctatgttggcacagcacaggcatatgctcatgcatctcttcagcactctcaactcctcgggggtcaaaaccatatcccagggcacggggaactcttgcaggacagcgaaccccgcagaacagggcaatcctcgcacagaacttacattgtgcatggacagggtatcgcaatcaggcagcaccgggtgatcctccaccagagaagcgcgggtctcggtctcctcacagcgtggtaagggggccggccgatacgggtgatggcgggacgcggctgatcgtgttcgcgaccgtgtcatgatgcagttgctttcggacattttcgtacttgctgtagcagaacctggtccgggcgctgcacaccgatcgccggcggcggtctcggcgcttggaacgctcggtgttgaaattgtaaaacagccactctctcagaccgtgcagcagatctagggcctcaggagtgatgaagatcccatcatgcctgatggctctgatcacatcgaccaccgtggaatgggccagacccagccagatgatgcaattttgttgggtttcggtgacggcgggggagggaagaacaggaagaaccatgattaacttttaatccaaacggtctcggagtacttcaaaatgaagatcgcggagatggcacctctcgcccccgctgtgttggtggaaaataacagccaggtcaaaggtgatacggttctcgagatgttccacggtggcttccagcaaagcctccacgcgcacatccagaaacaagacaatagcgaaagcgggagggttctctaattcctcaatcatcatgttacactcctgcaccatccccagataattttcatttttccagccttgaatgattcgaactagttcctgaggtaaatccaagccagccatgataaagagctcgcgcagagcgccctccaccggcattcttaagcacaccctcataattccaagatattctgctcctggttcacctgcagcagattgacaagcggaatatcaaaatctctgccgcgatccctgagctcctccctcagcaataactgtaagtactctttcatatcctctccgaaatttttagccataggaccaccaggaataagattagggcaagccacagtacagataaaccgaagtcctccccagtgagcattgccaaatgcaagactgctataagcatgctggctagacccggtgatatcttccagataactggacagaaaatcgcccaggcaatttttaagaaaatcaacaaaagaaaaatcctccaggtggacgtttagagcctcgggaacaacgatgaagtaaatgcaagcggtgcgttccagcatggttagttagctgatctgtagaaaaaacaaaaatgaacattaaaccatgctagcctggcgaacaggtgggtaaatcgttctctccagcaccaggcaggccacggggtctccggcgcgaccctcgtaaaaattgtcgctatgattgaaaaccatcacagagagacgttcccggtggccggcgtgaatgattcgacaagatgaatacacccccggaacattggcgtccgcgagtgaaaaaaagcgcccgaggaagcaataaggcactacaatgctcagtctcaagtccagcaaagcgatgccatgcggatgaagcacaaaattctcaggtgcgtacaaaatgtaattactcccctcctgcacaggcagcaaagcccccgatccctccaggtacacatacaaagcctcagcgtccatagcttaccgagcagcagcacacaacaggcgcaagagtcagagaaaggctgagctctaacctgtccacccgctctctgctcaatatatagcccagatctacactgacgtaaaggccaaagtctaaaaatacccgccaaataatcacacacgcccagcacacgcccagaaaccggtgacacactcaaaaaaatacgcgcacttcctcaaacgcccaaaactgccgtcatttccgggttcccacgctacgtcatcaaaacacgactttcaaattccgtcgaccgttaaaaacgtcacccgccccgcccctaacggtcgcccgtctctcagccaatcagcgccccgcatccccaaattcaaacacctcatttgcatattaacgcgcacaaaaagtttgaggtatattattgatgatgg

SEQ ID NO: 14 - DNA, 8602 bp, Artificial Sequence
  Description of Artificial Sequence: Synthetic polynucleotide
atgggcggcgcatgagagaagcccagaccaattacctacccaaaatggagaaagttcacgttgacatcgaggaagacagcccattcctcagagctttgcagcggagcttcccgcagtttgaggtagaagccaagcaggtcactgataatgaccatgctaatgccagagcgttttcgcatctggcttcaaaactgatcgaaacggaggtggacccatccgacacgatccttgacattggaagtgcgcccgcccgcagaatgtattctaagcacaagtatcattgtatctgtccgatgagatgtgcggaagatccggacagattgtataagtatgcaactaagctgaagaaaaactgtaaggaaataactgataaggaattggacaagaaaatgaaggagctcgccgccgtcatgagcgaccctgacctggaaactgagactatgtgcctccacgacgacgagtcgtgtcgctacgaagggcaagtcgctgtttaccaggatgtatacgcggttgacggaccgacaagtctctatcaccaagccaataagggagttagagtcgcctactggataggctttgacaccaccccttttatgtttaagaacttggctggagcatatccatcatactctaccaactgggccgacgaaaccgtgttaacggctcgtaacataggcctatgcagctctgacgttatggagcggtcacgtagagggatgtccattcttagaaagaagtatttgaaaccatccaacaatgttctattctctgttggctcgaccatctaccacgagaagagggacttactgaggagctggcacctgccgtctgtatttcacttacgtggcaagcaaaattacacatgtcggtgtgagactatagttagttgcgacgggtacgtcgttaaaagaatagctatcagtccaggcctgtatgggaagccttcaggctatgctgctacgatgcaccgcgagggattcttgtgctgcaaagtgacagacacattgaacggggagagggtctcttttcccgtgtgcacgtatgtgccagctacattgtgtgaccaaatgactggcatactggcaacagatgtcagtgcggacgacgcgcaaaaactgctggttgggctcaaccagcgtatagtcgtcaacggtcgcacccagagaaacaccaataccatgaaaaattaccttttgcccgtagtggcccaggcatttgctaggtgggcaaaggaatataaggaagatcaagaagatgaaaggccactaggactacgagatagacagttagtcatggggtgttgttgggcttttagaaggcacaagataacatctatttataagcgcccggatacccaaaccatcatcaaagtgaacagcgatttccactcattcgtgctgcccaggataggcagtaacacattggagatcgggctgagaacaagaatcaggaaaatgttagaggagcacaaggagccgtcacctctcattaccgccgaggacgtacaagaagctaagtgcgcagccgatgaggctaaggaggtgcgtgaagccgaggagttgcgcgcagctctaccacctttggcagctgatgttgaggagcccactctggaagccgatgtcgacttgatgttacaagaggctggggccggctcagtggagacacctcgtggcttgataaaggttaccagctacgctggcgaggacaagatcggctcttacgctgtgctttctccgcaggctgtactcaagagtgaaaaattatcttgcatccaccctctcgctgaacaagtcatagtgataacacactctggccgaaaagggcgttatgccgtggaaccataccatggtaaagtagtggtgccagagggacatgcaatacccgtccaggactttcaagctctgagtgaaagtgccaccattgtgtacaacgaacgtgagttcgtaaacaggtacctgcaccatattgccacacatggaggagcgctgaacactgatgaagaatattacaaaactgtcaagcccagcgagcacgacggcgaatacctgtacgacatcgacaggaaacagtgcgtcaagaaagaactagtcactgggctagggctcacaggcgagctggtggatcctcccttccatgaattcgcctacgagagtctgagaacacgaccagccgctccttaccaagtaccaaccataggggtgtatggcgtgccaggatcaggcaagtctggcatcattaaaagcgcagtcaccaaaaaagatctagtggtgagcgccaagaaagaaaactgtgcagaaattataagggacgtcaagaaaatgaaagggctggacgtcaatgccagaactgtggactcagtgctcttgaatggatgcaaacaccccgtagagaccctgtatattgacgaagcttttgcttgtcatgcaggtactctcagagcgctcatagccattataagacctaaaaaggcagtgctctgcggggatcccaaacagtgcggtttttttaacatgatgtgcctgaaagtgcattttaaccacgagatttgcacacaagtcttccacaaaagcatctctcgccgttgcactaaatctgtgacttcggtcgtctcaaccttgttttacgacaaaaaaatgagaacgacgaatccgaaagagactaagattgtgattgacactaccggcagtaccaaacctaagcaggacgatctcattctcacttgtttcagagggtgggtgaagcagttgcaaatagattacaaaggcaacgaaataatgacggcagctgcctctcaagggctgacccgtaaaggtgtgtatgccgttcggtacaaggtgaatgaaaatcctctgtacgcacccacctcagaacatgtgaacgtcctactgacccgcacggaggaccgcatcgtgtggaaaacactagccggcgacccatggataaaaacactgactgccaagtaccctgggaatttcactgccacgatagaggagtggcaagcagagcatgatgccatcatgaggcacatcttggagagaccggaccctaccgacgtcttccagaataaggcaaacgtgtgttgggccaaggctttagtgccggtgctgaagaccgctggcatagacatgaccactgaacaatggaacactgtggattattttgaaacggacaaagctcactcagcagagatagtattgaaccaactatgcgtgaggttctttggactcgatctggactccggtctattttctgcacccactgttccgttatccattaggaataatcactgggataactccccgtcgcctaacatgtacgggctgaataaagaagtggtccgtcagctctctcgcaggtacccacaactgcctcgggcagttgccactggaagagtctatgacatgaacactggtacactgcgcaattatgatccgcgcataaacctagtacctgtaaacagaagactgcctcatgctttagtcctccaccataatgaacacccacagagtgacttttcttcattcgtcagcaaattgaagggcagaactgtcctggtggtcggggaaaagttgtccgtcccaggcaaaatggttgactggttgtcagaccggcctgaggctaccttcagagctcggctggatttaggcatcccaggtgatgtgcccaaatatgacataatatttgttaatgtgaggaccccatataaataccatcactatcagcagtgtgaagaccatgccattaagcttagcatgttgaccaagaaagcttgtctgcatctgaatcccggcggaacctgtgtcagcataggttatggttacgctgacagggccagcgaaagcatcattggtgctatagcgcggcagttcaagttttcccgggtatgcaaaccgaaatcctcacttgaagagacggaagttctgtttgtattcattgggtacgatcgcaaggcccgtacgcacaatccttacaagctttcatcaaccttgaccaacatttatacaggttccagactccacgaagccggatgtgcaccctcatatcatgtggtgcgaggggatattgccacggccaccgaaggagtgattataaatgctgctaacagcaaaggacaacctggcggaggggtgtgcggagcgctgtataagaaattcccggaaagcttcgatttacagccgatcgaagtaggaaaagcgcgactggtcaaaggtgcagctaaacatatcattcatgccgtaggaccaaacttcaacaaagtttcggaggttgaaggtgacaaacagttggcagaggcttatgagtccatcgctaagattgtcaacgataacaattacaagtcagtagcgattccactgttgtccaccggcatcttttccgggaacaaagatcgactaacccaatcattgaaccatttgctgacagctttagacaccactgatgcagatgtagccatatactgcagggacaagaaatgggaaatgactctcaaggaagcagtggctaggagagaagcagtggaggagatatgcatatccgacgactcttcagtgacagaacctgatgcagagctggtgagggtgcatccgaagagttctttggctggaaggaagggctacagcacaagcgatggcaaaactttctcatatttggaagggaccaagtttcaccaggcggccaaggatatagcagaaattaatgccatgtggcccgttgcaacggaggccaatgagcaggtatgcatgtatatcctcggagaaagcatgagcagtattaggtcgaaatgccccgtcgaagagtcggaagcctccacaccacctagcacgctgccttgcttgtgcatccatgccatgactccagaaagagtacagcgcctaaaagcctcacgtccagaacaaattactgtgtgctcatcctttccattgccgaagtatagaatcactggtgtgcagaagatccaatgctcccagcctatattgttctcaccgaaagtgcctgcgtatattcatccaaggaagtatctcgtggaaacaccaccggtagacgagactccggagccatcggcagagaaccaatccacagaggggacacctgaacaaccaccacttataaccgaggatgagaccaggactagaacgcctgagccgatcatcatcgaagaggaagaagaggatagcataagtttgctgtcagatggcccgacccaccaggtgctgcaagtcgaggcagacattcacgggccgccctctgtatctagctcatcctggtccattcctcatgcatccgactttgatgtggacagtttatccatacttgacaccctggagggagctagcgtgaccagcggggcaacgtcagccgagactaactcttacttcgcaaagagtatggagtttctggcgcgaccggtgcctgcgcctcgaacagtattcaggaaccctccacatcccgctccgcgcacaagaacaccgtcacttgcacccagcagggcctgctcgagaaccagcctagtttccaccccgccaggcgtgaatagggtgatcactagagaggagctcgaggcgcttaccccgtcacgcactcctagcaggtcggtctcgagaaccagcctggtctccaacccgccaggcgtaaatagggtgattacaagagaggagtttgaggcgttcgtagcacaacaacaatgacggtttgatgcgggtgcatacatcttttcctccgacaccggtcaagggcatttacaacaaaaatcagtaaggcaaacggtgctatccgaagtggtgttggagaggaccgaattggagatttcgtatgccccgcgcctcgaccaagaaaaagaagaattactacgcaagaaattacagttaaatcccacacctgctaacagaagcagataccagtccaggaaggtggagaacatgaaagccataacagctagacgtattctgcaaggcctagggcattatttgaaggcagaaggaaaagtggagtgctaccgaaccctgcatcctgttcctttgtattcatctagtgtgaaccgtgccttttcaagccccaaggtcgcagtggaagcctgtaacgccatgttgaaagagaactttccgactgtggcttcttactgtattattccagagtacgatgcctatttggacatggttgacggagcttcatgctgcttagacactgccagtttttgccctgcaaagctgcgcagctttccaaagaaacactcctatttggaacccacaatacgatcggcagtgccttcagcgatccagaacacgctccagaacgtcctggcagctgccacaaaaagaaattgcaatgtcacgcaaatgagagaattgcccgtattggattcggcggcctttaatgtggaatgcttcaagaaatatgcgtgtaataatgaatattgggaaacgtttaaagaaaaccccatcaggcttactgaagaaaacgtggtaaattacattaccaaattaaaaggaccaaaagctgctgctctttttgcgaagacacataatttgaatatgttgcaggacataccaatggacaggtttgtaatggacttaaagagagacgtgaaagtgactccaggaacaaaacatactgaagaacggcccaaggtacaggtgatccaggctgccgatccgctagcaacagcgtatctgtgcggaatccaccgagagctggttaggagattaaatgcggtcctgcttccgaacattcatacactgtttgatatgtcggctgaagactttgacgctattatagccgagcacttccagcctggggattgtgttctggaaactgacatcgcgtcgtttgataaaagtgaggacgacgccatggctctgaccgcgttaatgattctggaagacttaggtgtggacgcagagctgttgacgctgattgaggcggctttcggcgaaatttcatcaatacatttgcccactaaaactaaatttaaattcggagccatgatgaaatctggaatgttcctcacactgtttgtgaacacagtcattaacattgtaatcgcaagcagagtgttgagagaacggctaaccggatcaccatgtgcagcattcattggagatgacaatatcgtgaaaggagtcaaatcggacaaattaatggcagacaggtgcgccacctggttgaatatggaagtcaagattatagatgctgtggtgggcgagaaagcgccttatttctgtggagggtttattttgtgtgactccgtgaccggcacagcgtgccgtgtggcagaccccctaaaaaggctgtttaagcttggcaaacctctggcagcagacgatgaacatgatgatgacaggagaagggcattgcatgaagagtcaacacgctggaaccgagtgggtattctttcagagctgtgcaaggcagtagaatcaaggtatgaaaccgtaggaacttccatcatagttatggccatgactactctagctagcagtgttaaatcattcagctacctgagaggggcccctataactctctacggctaacctgaatggactacgactctagaatagtctttaattaaagtccgccatatgaggccaccatgcagatcttcgtgaagaccctgaccggcaagaccatcaccctagaggtggagcccagtgacaccatcgagaacgtgaaggccaagatccaggataaagagggcatcccccctgaccagcagaggctgatctttgccggcaagcagctggaagatggccgcaccctctctgattacaacatccagaaggagtcaaccctgcacctggtccttcgcctgagaggtggcgctgcttacagtataatcaactttgaaaaactggctgcttacggcatcctgggctttgtgtttacactggctgcctacctgctgtttggctatcctgtgtacgtggccgcttatggactgtgtaccctggtggccatgctggctgcttacaatctggtgcctatggtggccacagtggccgcctattgtcttggcggactgctgacaatggtggcagcctacagcccgagctatgcgtatcatcagtttgcagcctacggcccaggaccaggcgctaaatttgtggctgcctggacactgaaagccgccgctggaccaggtcctggacagtacatcaaggccaacagcaagttcatcggcatcaccgaactcggcccaggaccaggctatccctacgatgtgcctgattacgcctgatagtgatgattcgaacggccgtatcacgcccaaacatttacagccgcggtgtcaaaaaccgcgtggacgtggttaacatccctgctgggaggatcagccgtaattattataattggcttggtgctggctactattgtggccatgtacgtgctgaccaaccagaaacataattgaatacagcagcaattggcaagctgcttacatagaactcgcggcgattggcatgccgccttaaaatttttattttattttttcttttcttttccgaatcggattttgtttttaatatttcaaaaaaaaaaaaaaaaaaaaaaaaaaaaaaaaaaaaaaaaaaaaaaaaaaaaaaaaaaaaaaaaaaaaaaaaaaaaaaaa

SEQ ID NO: 15 - DNA, 9595 bp, Artificial Sequence
  Description of Artificial Sequence: Synthetic polynucleotide
atgggcggcgcatgagagaagcccagaccaattacctacccaaaatggagaaagttcacgttgacatcgaggaagacagcccattcctcagagctttgcagcggagcttcccgcagtttgaggtagaagccaagcaggtcactgataatgaccatgctaatgccagagcgttttcgcatctggcttcaaaactgatcgaaacggaggtggacccatccgacacgatccttgacattggaagtgcgcccgcccgcagaatgtattctaagcacaagtatcattgtatctgtccgatgagatgtgcggaagatccggacagattgtataagtatgcaactaagctgaagaaaaactgtaaggaaataactgataaggaattggacaagaaaatgaaggagctcgccgccgtcatgagcgaccctgacctggaaactgagactatgtgcctccacgacgacgagtcgtgtcgctacgaagggcaagtcgctgtttaccaggatgtatacgcggttgacggaccgacaagtctctatcaccaagccaataagggagttagagtcgcctactggataggctttgacaccaccccttttatgtttaagaacttggctggagcatatccatcatactctaccaactgggccgacgaaaccgtgttaacggctcgtaacataggcctatgcagctctgacgttatggagcggtcacgtagagggatgtccattcttagaaagaagtatttgaaaccatccaacaatgttctattctctgttggctcgaccatctaccacgagaagagggacttactgaggagctggcacctgccgtctgtatttcacttacgtggcaagcaaaattacacatgtcggtgtgagactatagttagttgcgacgggtacgtcgttaaaagaatagctatcagtccaggcctgtatgggaagccttcaggctatgctgctacgatgcaccgcgagggattcttgtgctgcaaagtgacagacacattgaacggggagagggtctcttttcccgtgtgcacgtatgtgccagctacattgtgtgaccaaatgactggcatactggcaacagatgtcagtgcggacgacgcgcaaaaactgctggttgggctcaaccagcgtatagtcgtcaacggtcgcacccagagaaacaccaataccatgaaaaattaccttttgcccgtagtggcccaggcatttgctaggtgggcaaaggaatataaggaagatcaagaagatgaaaggccactaggactacgagatagacagttagtcatggggtgttgttgggcttttagaaggcacaagataacatctatttataagcgcccggatacccaaaccatcatcaaagtgaacagcgatttccactcattcgtgctgcccaggataggcagtaacacattggagatcgggctgagaacaagaatcaggaaaatgttagaggagcacaaggagccgtcacctctcattaccgccgaggacgtacaagaagctaagtgcgcagccgatgaggctaaggaggtgcgtgaagccgaggagttgcgcgcagctctaccacctttggcagctgatgttgaggagcccactctggaagccgatgtcgacttgatgttacaagaggctggggccggctcagtggagacacctcgtggcttgataaaggttaccagctacgctggcgaggacaagatcggctcttacgctgtgctttctccgcaggctgtactcaagagtgaaaaattatcttgcatccaccctctcgctgaacaagtcatagtgataacacactctggccgaaaagggcgttatgccgtggaaccataccatggtaaagtagtggtgccagagggacatgcaatacccgtccaggactttcaagctctgagtgaaagtgccaccattgtgtacaacgaacgtgagttcgtaaacaggtacctgcaccatattgccacacatggaggagcgctgaacactgatgaagaatattacaaaactgtcaagcccagcgagcacgacggcgaatacctgtacgacatcgacaggaaacagtgcgtcaagaaagaactagtcactgggctagggctcacaggcgagctggtggatcctcccttccatgaattcgcctacgagagtctgagaacacgaccagccgctccttaccaagtaccaaccataggggtgtatggcgtgccaggatcaggcaagtctggcatcattaaaagcgcagtcaccaaaaaagatctagtggtgagcgccaagaaagaaaactgtgcagaaattataagggacgtcaagaaaatgaaagggctggacgtcaatgccagaactgtggactcagtgctcttgaatggatgcaaacaccccgtagagaccctgtatattgacgaagcttttgcttgtcatgcaggtactctcagagcgctcatagccattataagacctaaaaaggcagtgctctgcggggatcccaaacagtgcggtttttttaacatgatgtgcctgaaagtgcattttaaccacgagatttgcacacaagtcttccacaaaagcatctctcgccgttgcactaaatctgtgacttcggtcgtctcaaccttgttttacgacaaaaaaatgagaacgacgaatccgaaagagactaagattgtgattgacactaccggcagtaccaaacctaagcaggacgatctcattctcacttgtttcagagggtgggtgaagcagttgcaaatagattacaaaggcaacgaaataatgacggcagctgcctctcaagggctgacccgtaaaggtgtgtatgccgttcggtacaaggtgaatgaaaatcctctgtacgcacccacctcagaacatgtgaacgtcctactgacccgcacggaggaccgcatcgtgtggaaaacactagccggcgacccatggataaaaacactgactgccaagtaccctgggaatttcactgccacgatagaggagtggcaagcagagcatgatgccatcatgaggcacatcttggagagaccggaccctaccgacgtcttccagaataaggcaaacgtgtgttgggccaaggctttagtgccggtgctgaagaccgctggcatagacatgaccactgaacaatggaacactgtggattattttgaaacggacaaagctcactcagcagagatagtattgaaccaactatgcgtgaggttctttggactcgatctggactccggtctattttctgcacccactgttccgttatccattaggaataatcactgggataactccccgtcgcctaacatgtacgggctgaataaagaagtggtccgtcagctctctcgcaggtacccacaactgcctcgggcagttgccactggaagagtctatgacatgaacactggtacactgcgcaattatgatccgcgcataaacctagtacctgtaaacagaagactgcctcatgctttagtcctccaccataatgaacacccacagagtgacttttcttcattcgtcagcaaattgaagggcagaactgtcctggtggtcggggaaaagttgtccgtcccaggcaaaatggttgactggttgtcagaccggcctgaggctaccttcagagctcggctggatttaggcatcccaggtgatgtgcccaaatatgacataatatttgttaatgtgaggaccccatataaataccatcactatcagcagtgtgaagaccatgccattaagcttagcatgttgaccaagaaagcttgtctgcatctgaatcccggcggaacctgtgtcagcataggttatggttacgctgacagggccagcgaaagcatcattggtgctatagcgcggcagttcaagttttcccgggtatgcaaaccgaaatcctcacttgaagagacggaagttctgtttgtattcattgggtacgatcgcaaggcccgtacgcacaatccttacaagctttcatcaaccttgaccaacatttatacaggttccagactccacgaagccggatgtgcaccctcatatcatgtggtgcgaggggatattgccacggccaccgaaggagtgattataaatgctgctaacagcaaaggacaacctggcggaggggtgtgcggagcgctgtataagaaattcccggaaagcttcgatttacagccgatcgaagtaggaaaagcgcgactggtcaaaggtgcagctaaacatatcattcatgccgtaggaccaaacttcaacaaagtttcggaggttgaaggtgacaaacagttggcagaggcttatgagtccatcgctaagattgtcaacgataacaattacaagtcagtagcgattccactgttgtccaccggcatcttttccgggaacaaagatcgactaacccaatcattgaaccatttgctgacagctttagacaccactgatgcagatgtagccatatactgcagggacaagaaatgggaaatgactctcaaggaagcagtggctaggagagaagcagtggaggagatatgcatatccgacgactcttcagtgacagaacctgatgcagagctggtgagggtgcatccgaagagttctttggctggaaggaagggctacagcacaagcgatggcaaaactttctcatatttggaagggaccaagtttcaccaggcggccaaggatatagcagaaattaatgccatgtggcccgttgcaacggaggccaatgagcaggtatgcatgtatatcctcggagaaagcatgagcagtattaggtcgaaatgccccgtcgaagagtcggaagcctccacaccacctagcacgctgccttgcttgtgcatccatgccatgactccagaaagagtacagcgcctaaaagcctcacgtccagaacaaattactgtgtgctcatcctttccattgccgaagtatagaatcactggtgtgcagaagatccaatgctcccagcctatattgttctcaccgaaagtgcctgcgtatattcatccaaggaagtatctcgtggaaacaccaccggtagacgagactccggagccatcggcagagaaccaatccacagaggggacacctgaacaaccaccacttataaccgaggatgagaccaggactagaacgcctgagccgatcatcatcgaagaggaagaagaggatagcataagtttgctgtcagatggcccgacccaccaggtgctgcaagtcgaggcagacattcacgggccgccctctgtatctagctcatcctggtccattcctcatgcatccgactttgatgtggacagtttatccatacttgacaccctggagggagctagcgtgaccagcggggcaacgtcagccgagactaactcttacttcgcaaagagtatggagtttctggcgcgaccggtgcctgcgcctcgaacagtattcaggaaccctccacatcccgctccgcgcacaagaacaccgtcacttgcacccagcagggcctgctcgagaaccagcctagtttccaccccgccaggcgtgaatagggtgatcactagagaggagctcgaggcgcttaccccgtcacgcactcctagcaggtcggtctcgagaaccagcctggtctccaacccgccaggcgtaaatagggtgattacaagagaggagtttgaggcgttcgtagcacaacaacaatgacggtttgatgcgggtgcatacatcttttcctccgacaccggtcaagggcatttacaacaaaaatcagtaaggcaaacggtgctatccgaagtggtgttggagaggaccgaattggagatttcgtatgccccgcgcctcgaccaagaaaaagaagaattactacgcaagaaattacagttaaatcccacacctgctaacagaagcagataccagtccaggaaggtggagaacatgaaagccataacagctagacgtattctgcaaggcctagggcattatttgaaggcagaaggaaaagtggagtgctaccgaaccctgcatcctgttcctttgtattcatctagtgtgaaccgtgccttttcaagccccaaggtcgcagtggaagcctgtaacgccatgttgaaagagaactttccgactgtggcttcttactgtattattccagagtacgatgcctatttggacatggttgacggagcttcatgctgcttagacactgccagtttttgccctgcaaagctgcgcagctttccaaagaaacactcctatttggaacccacaatacgatcggcagtgccttcagcgatccagaacacgctccagaacgtcctggcagctgccacaaaaagaaattgcaatgtcacgcaaatgagagaattgcccgtattggattcggcggcctttaatgtggaatgcttcaagaaatatgcgtgtaataatgaatattgggaaacgtttaaagaaaaccccatcaggcttactgaagaaaacgtggtaaattacattaccaaattaaaaggaccaaaagctgctgctctttttgcgaagacacataatttgaatatgttgcaggacataccaatggacaggtttgtaatggacttaaagagagacgtgaaagtgactccaggaacaaaacatactgaagaacggcccaaggtacaggtgatccaggctgccgatccgctagcaacagcgtatctgtgcggaatccaccgagagctggttaggagattaaatgcggtcctgcttccgaacattcatacactgtttgatatgtcggctgaagactttgacgctattatagccgagcacttccagcctggggattgtgttctggaaactgacatcgcgtcgtttgataaaagtgaggacgacgccatggctctgaccgcgttaatgattctggaagacttaggtgtggacgcagagctgttgacgctgattgaggcggctttcggcgaaatttcatcaatacatttgcccactaaaactaaatttaaattcggagccatgatgaaatctggaatgttcctcacactgtttgtgaacacagtcattaacattgtaatcgcaagcagagtgttgagagaacggctaaccggatcaccatgtgcagcattcattggagatgacaatatcgtgaaaggagtcaaatcggacaaattaatggcagacaggtgcgccacctggttgaatatggaagtcaagattatagatgctgtggtgggcgagaaagcgccttatttctgtggagggtttattttgtgtgactccgtgaccggcacagcgtgccgtgtggcagaccccctaaaaaggctgtttaagcttggcaaacctctggcagcagacgatgaacatgatgatgacaggagaagggcattgcatgaagagtcaacacgctggaaccgagtgggtattctttcagagctgtgcaaggcagtagaatcaaggtatgaaaccgtaggaacttccatcatagttatggccatgactactctagctagcagtgttaaatcattcagctacctgagaggggcccctataactctctacggctaacctgaatggactacgactctagaatagtctttaattaaagtccgccatatgagatggaagatgccaaaaacattaagaagggcccagcgccattctacccactcgaagacgggaccgccggcgagcagctgcacaaagccatgaagcgctacgccctggtgcccggcaccatcgcctttaccgacgcacatatcgaggtggacattacctacgccgagtacttcgagatgagcgttcggctggcagaagctatgaagcgctatgggctgaatacaaaccatcggatcgtggtgtgcagcgagaatagcttgcagttcttcatgcccgtgttgggtgccctgttcatcggtgtggctgtggccccagctaacgacatctacaacgagcgcgagctgctgaacagcatgggcatcagccagcccaccgtcgtattcgtgagcaagaaagggctgcaaaagatcctcaacgtgcaaaagaagctaccgatcatacaaaagatcatcatcatggatagcaagaccgactaccagggcttccaaagcatgtacaccttcgtgacttcccatttgccacccggcttcaacgagtacgacttcgtgcccgagagcttcgaccgggacaaaaccatcgccctgatcatgaacagtagtggcagtaccggattgcccaagggcgtagccctaccgcaccgcaccgcttgtgtccgattcagtcatgcccgcgaccccatcttcggcaaccagatcatccccgacaccgctatcctcagcgtggtgccatttcaccacggcttcggcatgttcaccacgctgggctacttgatctgcggctttcgggtcgtgctcatgtaccgcttcgaggaggagctattcttgcgcagcttgcaagactataagattcaatctgccctgctggtgcccacactatttagcttcttcgctaagagcactctcatcgacaagtacgacctaagcaacttgcacgagatcgccagcggcggggcgccgctcagcaaggaggtaggtgaggccgtggccaaacgcttccacctaccaggcatccgccagggctacggcctgacagaaacaaccagcgccattctgatcacccccgaaggggacgacaagcctggcgcagtaggcaaggtggtgcccttcttcgaggctaaggtggtggacttggacaccggtaagacactgggtgtgaaccagcgcggcgagctgtgcgtccgtggccccatgatcatgagcggctacgttaacaaccccgaggctacaaacgctctcatcgacaaggacggctggctgcacagcggcgacatcgcctactgggacgaggacgagcacttcttcatcgtggaccggctgaagagcctgatcaaatacaagggctaccaggtagccccagccgaactggagagcatcctgctgcaacaccccaacatcttcgacgccggggtcgccggcctgcccgacgacgatgccggcgagctgcccgccgcagtcgtcgtgctggaacacggtaaaaccatgaccgagaaggagatcgtggactatgtggccagccaggttacaaccgccaagaagctgcgcggtggtgttgtgttcgtggacgaggtgcctaaaggactgaccggcaagttggacgcccgcaagatccgcgagattctcattaaggccaagaagggcggcaagatcgccgtgtaattcgaacggccgtatcacgcccaaacatttacagccgcggtgtcaaaaaccgcgtggacgtggttaacatccctgctgggaggatcagccgtaattattataattggcttggtgctggctactattgtggccatgtacgtgctgaccaaccagaaacataattgaatacagcagcaattggcaagctgcttacatagaactcgcggcgattggcatgccgccttaaaatttttattttattttttcttttcttttccgaatcggattttgtttttaatatttcaaaaaaaaaaaaaaaaaaaaaaaaaaaaaaaaaaaaaaaaaaaaaaaaaaaaaaaaaaaaaaaaaaaaaaaaaaaaaaaa

SEQ ID NO: 16 - protein, 139 aa, Artificial Sequence
  Description of Artificial Sequence: Synthetic polypeptide
PSSLSASVGDRVTITCRASQSINSYLDWYQQKPGKAPKLLIYAASSLQSGVPSRFSGSGSGTDFTLTISSLQPEDFATYYCQQYYSTPFTFGPGTKVEIKRTVAAPSVFIFPPSDEQLKSGTASVVCLLNNFYPREAKV

SEQ ID NO: 17 - protein, 167 aa, Artificial Sequence
  Description of Artificial Sequence: Synthetic polypeptide
GVVQPGRSLRLSCAASGFTFSSYGMHWVRQAPGKGLEWVAVIWYDGSNKYYADSVKGRFTISRDNSKNTLYLQMNSLRAEDTAVYYCARDPRGATLYYYYYGMDVWGQGTTVTVSSASTKGPSVFPLAPCSRSTSESTAALGCLVKDYFPEPVTVSWNSGALTSGVH

SEQ ID NO: 18 - protein, 10 aa, Artificial Sequence
  Description of Artificial Sequence: Synthetic peptide
GFTFSSYGMH

SEQ ID NO: 19 - protein, 15 aa, Artificial Sequence
  Description of Artificial Sequence: Synthetic peptide
VIWYDGSNKYYADSV

SEQ ID NO: 20 - protein, 16 aa, Artificial Sequence
  Description of Artificial Sequence: Synthetic peptide
DPRGATLYYYYYGMDV

SEQ ID NO: 21 - protein, 11 aa, Artificial Sequence
  Description of Artificial Sequence: Synthetic peptide
RASQSINSYLD

SEQ ID NO: 22 - protein, 7 aa, Artificial Sequence
  Description of Artificial Sequence: Synthetic peptide
AASSLQS

SEQ ID NO: 23 - protein, 9 aa, Artificial Sequence
  Description of Artificial Sequence: Synthetic peptide
QQYYSTPFT

SEQ ID NO: 24 - protein, 108 aa, Artificial Sequence
  Description of Artificial Sequence: Synthetic polypeptide
EIVLTQSPGTLSLSPGERATLSCRASQRVSSSYLAWYQQKPGQAPRLLIYDASSRATGIPDRFSGSGSGTDFTLTISRLEPEDFAVYYCQQYGSLPWTFGQGTKVEIK

SEQ ID NO: 25 - protein, 121 aa, Artificial Sequence
  Description of Artificial Sequence: Synthetic polypeptide
EVQLVESGGGLVQPGGSLRLSCAASGFTFSRYWMSWVRQAPGKGLEWVANIKQDGSEKYYVDSVKGRFTISRDNAKNSLYLQMNSLRAEDTAVYYCAREGGWFGELAFDYWGQGTLVTVSS

SEQ ID NO: 26 - protein, 5 aa, Artificial Sequence
  Description of Artificial Sequence: Synthetic peptide
RYWMS

SEQ ID NO: 27 - protein, 17 aa, Artificial Sequence
  Description of Artificial Sequence: Synthetic peptide
NIKQDGSEKYYVDSVKG

SEQ ID NO: 28 - protein, 12 aa, Artificial Sequence
  Description of Artificial Sequence: Synthetic peptide
EGGWFGELAFDY

SEQ ID NO: 29 - protein, 12 aa, Artificial Sequence
  Description of Artificial Sequence: Synthetic peptide
RASQRVSSSYLA

SEQ ID NO: 30 - protein, 7 aa, Artificial Sequence
  Description of Artificial Sequence: Synthetic peptide
DASSRAT

SEQ ID NO: 31 - protein, 9 aa, Artificial Sequence
  Description of Artificial Sequence: Synthetic peptide
QQYGSLPWT

SEQ ID NO: 32 - DNA, 2019 bp, Artificial Sequence
  Description of Artificial Sequence: Synthetic polynucleotide
gcccgggcatttaaatgcgatcgcatcgattacgactctagaatagtctagtccgcaggccaccatgcagatcttcgtgaagaccctgaccggcaagaccatcaccctagaggtggagcccagtgacaccatcgagaacgtgaaggccaagatccaggataaagagggcatcccccctgaccagcagaggctgatctttgccggcaagcagctggaagatggccgcaccctctctgattacaacatccagaaggagtcaaccctgcacctggtccttcgcctgagaggtgccatgtttcaggcgctgagcgaaggctgcaccccgtatgatattaaccagatgctgaacgtgctgggcgatcatcaggtctcaggccttgagcagcttgagagtataatcaactttgaaaaactgactgaatggaccagttctaatgttatgcctatcctgtctcctctgacaaagggcatcctgggcttcgtgtttaccctgaccgtgccttctgagagaggacttagctgcattagcgaagcggatgcgaccaccccggaaagcgcgaacctgggcgaagaaattctgagccagctgtatctttggccaagggtgacctaccattcccctagttatgcttaccaccaatttgaaagacgagccaaatataaaagacacttccccggctttggccagagcctgctgtttggctaccctgtgtacgtgttcggcgattgcgtgcagggcgattgggatgcgattcgctttcgctattgcgcgccgccgggctatgcgctgctgcgctgcaacgataccaactatagcgctctgctggctgtgggggccctagaaggacccaggaatcaggactggcttggtgtcccaagacaacttgtaactcggatgcaggctattcagaatgccggcctgtgtaccctggtggccatgctggaagagacaatcttctggctgcaagcgtttctgatggcgctgaccgatagcggcccgaaaaccaacattattgtggatagccagtatgtgatgggcattagcaaaccgagctttcaggaatttgtggattgggaaaacgtgagcccggaactgaacagcaccgatcagccgttttggcaagccggaatcctggccagaaatctggtgcctatggtggccacagtgcagggccagaacctgaagtaccagggtcagtcactagtcatctctgcttctatcattgtcttcaacctgctggaactggaaggtgattatcgagatgatggcaacgtgtgggtgcataccccgctgagcccgcgcaccctgaacgcgtgggtgaaagcggtggaagaaaaaaaaggtattccagttcacctagagctggccagtatgaccaacatggagctcatgagcagtattgtgcatcagcaggtcagaacatacggccccgtgttcatgtgtctcggcggactgcttacaatggtggctggtgctgtgtggctgacagtgcgagtgctcgagctgttccgggccgcgcagctggccaacgacgtggtcctccagatcatggagctttgtggtgcagcgtttcgccaggtgtgccataccaccgtgccgtggccgaacgcgagcctgaccccgaaatggaacaacgaaaccacccagccccagatcgccaactgcagcgtgtatgacttttttgtgtggctccattattattctgttcgagacacactttggccaagggtgacctaccatatgaacaaatatgcgtatcatatgctggaaagacgagccaaatataaaagaggaccaggacctggcgctaaatttgtggccgcctggacactgaaagccgctgctggtcctggacctggccagtacatcaaggccaacagcaagttcatcggcatcaccgaactcggacccggaccaggctgatgatttcgaaatttaaataagcttgcggccgctagggataacagggtaattatcacgcccaaacatttacagccgcggtgtcaaaaaccgcgtgg

SEQ ID NO: 33 - protein, 619 aa, Artificial Sequence
  Description of Artificial Sequence: Synthetic polypeptide
MQIFVKTLTGKTITLEVEPSDTIENVKAKIQDKEGIPPDQQRLIFAGKQLEDGRTLSDYNIQKESTLHLVLRLRGAMFQALSEGCTPYDINQMLNVLGDHQVSGLEQLESIINFEKLTEWTSSNVMPILSPLTKGILGFVFTLTVPSERGLSCISEADATTPESANLGEEILSQLYLWPRVTYHSPSYAYHQFERRAKYKRHFPGFGQSLLFGYPVYVFGDCVQGDWDAIRFRYCAPPGYALLRCNDTNYSALLAVGALEGPRNQDWLGVPRQLVTRMQAIQNAGLCTLVAMLEETIFWLQAFLMALTDSGPKTNIIVDSQYVMGISKPSFQEFVDWENVSPELNSTDQPFWQAGILARNLVPMVATVQGQNLKYQGQSLVISASIIVFNLLELEGDYRDDGNVWVHTPLSPRTLNAWVKAVEEKKGIPVHLELASMTNMELMSSIVHQQVRTYGPVFMCLGGLLTMVAGAVWLTVRVLELFRAAQLANDVVLQIMELCGAAFRQVCHTTVPWPNASLTPKWNNETTQPQIANCSVYDFFVWLHYYSVRDTLWPRVTYHMNKYAYHMLERRAKYKRGPGPGAKFVAAWTLKAAAGPGPGQYIKANSKFIGITELGPGPG

SEQ ID NO: 34 - DNA, 1638 bp, Artificial Sequence
  Description of Artificial Sequence: Synthetic polynucleotide
atggccgggatgttccaggcactgtccgaaggctgcacaccctatgatattaaccagatgctgaatgtcctgggagaccaccaggtctctggcctggagcagctggagagcatcatcaacttcgagaagctgaccgagtggacaagctccaatgtgatgcctatcctgtccccactgaccaagggcatcctgggcttcgtgtttaccctgacagtgccttctgagcggggcctgtcttgcatcagcgaggcagacgcaaccacaccagagtccgccaatctgggcgaggagatcctgtctcagctgtacctgtggccccgggtgacatatcactccccttcttacgcctatcaccagttcgagcggagagccaagtacaagagacacttcccaggctttggccagtctctgctgttcggctaccccgtgtacgtgttcggcgattgcgtgcagggcgactgggatgccatccggtttagatactgcgcaccacctggatatgcactgctgaggtgtaacgacaccaattattccgccctgctggcagtgggcgccctggagggccctcgcaatcaggattggctgggcgtgccaaggcagctggtgacacgcatgcaggccatccagaacgcaggcctgtgcaccctggtggcaatgctggaggagacaatcttctggctgcaggcctttctgatggccctgaccgacagcggccccaagacaaacatcatcgtggattcccagtacgtgatgggcatctccaagccttctttccaggagtttgtggactgggagaacgtgagcccagagctgaattccaccgatcagccattctggcaggcaggaatcctggcaaggaacctggtgcctatggtggccacagtgcagggccagaatctgaagtaccagggccagagcctggtcatcagcgcctccatcatcgtgtttaacctgctggagctggagggcgactatcgggacgatggcaacgtgtgggtgcacaccccactgagccccagaacactgaacgcctgggtgaaggccgtggaggagaagaagggcatcccagtgcacctggagctggcctccatgaccaatatggagctgatgtctagcatcgtgcaccagcaggtgaggacatacggacccgtgttcatgtgcctgggaggcctgctgaccatggtggcaggagccgtgtggctgacagtgcgggtgctggagctgttcagagccgcccagctggccaacgatgtggtgctgcagatcatggagctgtgcggagcagcctttcgccaggtgtgccacaccacagtgccatggcccaatgcctccctgacccccaagtggaacaatgagacaacacagcctcagatcgccaactgtagcgtgtacgacttcttcgtgtggctgcactactatagcgtgagggataccctgtggccccgcgtgacataccacatgaataagtacgcctatcacatgctggagaggcgcgccaagtataagagaggccctggcccaggcgcaaagtttgtggcagcatggaccctgaaggccgccgccggccccggccccggccagtatatcaaggctaacagtaagttcattggaatcacagagctgggacccggacctgga

SEQ ID NO: 35 - protein, 546 aa, Artificial Sequence
  Description of Artificial Sequence: Synthetic polypeptide
MAGMFQALSEGCTPYDINQMLNVLGDHQVSGLEQLESIINFEKLTEWTSSNVMPILSPLTKGILGFVFTLTVPSERGLSCISEADATTPESANLGEEILSQLYLWPRVTYHSPSYAYHQFERRAKYKRHFPGFGQSLLFGYPVYVFGDCVQGDWDAIRFRYCAPPGYALLRCNDTNYSALLAVGALEGPRNQDWLGVPRQLVTRMQAIQNAGLCTLVAMLEETIFWLQAFLMALTDSGPKTNIIVDSQYVMGISKPSFQEFVDWENVSPELNSTDQPFWQAGILARNLVPMVATVQGQNLKYQGQSLVISASIIVFNLLELEGDYRDDGNVWVHTPLSPRTLNAWVKAVEEKKGIPVHLELASMTNMELMSSIVHQQVRTYGPVFMCLGGLLTMVAGAVWLTVRVLELFRAAQLANDVVLQIMELCGAAFRQVCHTTVPWPNASLTPKWNNETTQPQIANCSVYDFFVWLHYYSVRDTLWPRVTYHMNKYAYHMLERRAKYKRGPGPGAKFVAAWTLKAAAGPGPGQYIKANSKFIGITELGPGPG

SEQ ID NO: 36 - DNA, 2019 bp, Artificial Sequence
  Description of Artificial Sequence: Synthetic polynucleotide
gcccgggcatttaaatgcgatcgcatcgattacgactctagaatagtctagtccgcaggccaccatgcagatcttcgtgaagaccctgaccggcaagaccatcaccctagaggtggagcccagtgacaccatcgagaacgtgaaggccaagatccaggataaagagggcatcccccctgaccagcagaggctgatctttgccggcaagcagctggaagatggccgcaccctctctgattacaacatccagaaggagtcaaccctgcacctggtccttcgcctgagaggtgccatgtttcaggcgctgagcgaaggctgcaccccgtatgatattaaccagatgctgaacgtgctgggcgatcatcagtttaagcacatcaaagcctttgaccggacatttgctaacaacccaggtcccatggttgtgtttgccacacctgggcctatcctgtctcctctgacaaagggcatcctgggcttcgtgtttaccctgaccgtgccttctgagagaggacttagctgcattagcgaagcggatgcgaccaccccggaaagcgcgaacctgggcgaagaaattctgagccagctgtatctttggccaagggtgacctaccattcccctagttatgcttaccaccaatttgaaagacgagccaaatataaaagacacttccccggctttggccagagcctgctgtttggctaccctgtgtacgtgttcggcgattgcgtgcagggcgattgggatgcgattcgctttcgctattgcgcgccgccgggctatgcgctgctgcgctgcaacgataccaactatagcgctctgctggctgtgggggccctagaaggacccaggaatcaggactggcttggtgtcccaagacaacttgtaactcggatgcaggctattcagaatgccggcctgtgtaccctggtggccatgctggaagagacaatcttctggctgcaagcgtttctgatggcgctgaccgatagcggcccgaaaaccaacattattgtggatagccagtatgtgatgggcattagcaaaccgagctttcaggaatttgtggattgggaaaacgtgagcccggaactgaacagcaccgatcagccgttttggcaagccggaatcctggccagaaatctggtgcctatggtggccacagtgcagggccagaacctgaagtaccagggtcagtcactagtcatctctgcttctatcattgtcttcaacctgctggaactggaaggtgattatcgagatgatggcaacgtgtgggtgcataccccgctgagcccgcgcaccctgaacgcgtgggtgaaagcggtggaagaaaaaaaaggtattccagttcacctagagctggccagtatgaccaacatggagctcatgagcagtattgtgcatcagcaggtcagaacatacggccccgtgttcatgtgtctcggcggactgcttacaatggtggctggtgctgtgtggctgacagtgcgagtgctcgagctgttccgggccgcgcagctggccaacgacgtggtcctccagatcatggagctttgtggtgcagcgtttcgccaggtgtgccataccaccgtgccgtggccgaacgcgagcctgaccccgaaatggaacaacgaaaccacccagccccagatcgccaactgcagcgtgtatgacttttttgtgtggctccattattattctgttcgagacacactttggccaagggtgacctaccatatgaacaaatatgcgtatcatatgctggaaagacgagccaaatataaaagaggaccaggacctggcgctaaatttgtggccgcctggacactgaaagccgctgctggtcctggacctggccagtacatcaaggccaacagcaagttcatcggcatcaccgaactcggacccggaccaggctgatgatttcgaaatttaaataagcttgcggccgctagggataacagggtaattatcacgcccaaacatttacagccgcggtgtcaaaaaccgcgtgg

SEQ ID NO: 37 - protein, 619 aa, Artificial Sequence
  Description of Artificial Sequence: Synthetic polypeptide
MQIFVKTLTGKTITLEVEPSDTIENVKAKIQDKEGIPPDQQRLIFAGKQLEDGRTLSDYNIQKESTLHLVLRLRGAMFQALSEGCTPYDINQMLNVLGDHQFKHIKAFDRTFANNPGPMVVFATPGPILSPLTKGILGFVFTLTVPSERGLSCISEADATTPESANLGEEILSQLYLWPRVTYHSPSYAYHQFERRAKYKRHFPGFGQSLLFGYPVYVFGDCVQGDWDAIRFRYCAPPGYALLRCNDTNYSALLAVGALEGPRNQDWLGVPRQLVTRMQAIQNAGLCTLVAMLEETIFWLQAFLMALTDSGPKTNIIVDSQYVMGISKPSFQEFVDWENVSPELNSTDQPFWQAGILARNLVPMVATVQGQNLKYQGQSLVISASIIVFNLLELEGDYRDDGNVWVHTPLSPRTLNAWVKAVEEKKGIPVHLELASMTNMELMSSIVHQQVRTYGPVFMCLGGLLTMVAGAVWLTVRVLELFRAAQLANDVVLQIMELCGAAFRQVCHTTVPWPNASLTPKWNNETTQPQIANCSVYDFFVWLHYYSVRDTLWPRVTYHMNKYAYHMLERRAKYKRGPGPGAKFVAAWTLKAAAGPGPGQYIKANSKFIGITELGPGPG

SEQ ID NO: 38 - DNA, 228 bp, Artificial Sequence
  Description of Artificial Sequence: Synthetic polynucleotide
atgcagatcttcgtgaagaccctgaccggcaagaccatcaccctagaggtggagcccagtgacaccatcgagaacgtgaaggccaagatccaggataaagagggcatcccccctgaccagcagaggctgatctttgccggcaagcagctggaagatggccgcaccctctctgattacaacatccagaaggagtcaaccctgcacctggtccttcgcctgagaggtggc

SEQ ID NO: 39 - DNA, 228 bp, Artificial Sequence
  Description of Artificial Sequence: Synthetic polynucleotide
atgcagatcttcgtgaagaccctgaccggcaagaccatcaccctagaggtggagcccagtgacaccatcgagaacgtgaaggccaagatccaggataaagagggcatcccccctgaccagcagaggctgatctttgccggcaagcagctggaagatggccgcaccctctctgattacaacatccagaaggagtcaaccctgcacctggtccttcgcctgagaggtgcc

SEQ ID NO: 40 - DNA, 78 bp, Homo sapiens
atggccgtcatggcgccccgaaccctcgtcctgctactctcgggggctctggccctgacccagacctgggcgggctct

SEQ ID NO: 41 - DNA, 201 bp, Homo sapiens
ccgtcttcccagcccaccatccccatcgtgggcatcattgctggcctggttctctttggagctgtgatcactggagctgtggtcgctgctgtgatgtggaggaggaagagctcagatagaaaaggagggagctactctcaggctgcaagcagtgacagtgcccagggctctgatgtgtctctcacagcttgtaaagtgtga

SEQ ID NO: 42 - DNA, 60 bp, Artificial Sequence
  Description of Artificial Sequence: Synthetic oligonucleotide
atggagaccgatacactgctgctgtgggtgctgctcctgtgggtgccaggaagcacaggc

SEQ ID NO: 43 - DNA, 3178 bp, Homo sapiens
ggcaccgattcggggcctgcccggacttcgccgcacgctgcagaacctcgcccagcgcccaccatgccccggcagctcagcgcggcggccgcgctcttcgcgtccctggccgtaattttgcacgatggcagtcaaatgagagcaaaagcatttccagaaaccagagattattctcaacctactgcagcagcaacagtacaggacataaaaaaacctgtccagcaaccagctaagcaagcacctcaccaaactttagcagcaagattcatggatggtcatatcacctttcaaacagcggccacagtaaaaattccaacaactaccccagcaactacaaaaaacactgcaaccaccagcccaattacctacaccctggtcacaacccaggccacacccaacaactcacacacagctcctccagttactgaagttacagtcggccctagcttagccccttattcactgccacccaccatcaccccaccagctcatacagctggaaccagttcatcaaccgtcagccacacaactgggaacaccactcaacccagtaaccagaccacccttccagcaactttatcgatagcactgcacaaaagcacaaccggtcagaagcctgatcaacccacccatgccccaggaacaacggcagctgcccacaataccacccgcacagctgcacctgcctccacggttcctgggcccacccttgcacctcagccatcgtcagtcaagactggaatttatcaggttctaaacggaagcagactctgtataaaagcagagatggggatacagctgattgttcaagacaaggagtcggttttttcacctcggagatacttcaacatcgaccccaacgcaacgcaagcctctgggaactgtggcacccgaaaatccaaccttctgttgaattttcagggcggatttgtgaatctcacatttaccaaggatgaagaatcatattatatcagtgaagtgggagcctatttgaccgtctcagatccagagacagtttaccaaggaatcaaacatgcggtggtgatgttccagacagcagtcgggcattccttcaagtgcgtgagtgaacagagcctccagttgtcagcccacctgcaggtgaaaacaaccgatgtccaacttcaagcctttgattttgaagatgaccactttggaaatgtggatgagtgctcgtctgactacacaattgtgcttcctgtgattggggccatcgtggttggtctctgccttatgggtatgggtgtctataaaatccgcctaaggtgtcaatcatctggataccagagaatctaattgttgcccggggggaatgaaaataatggaatttagagaactctttcatcccttccaggatggatgttgggaaattccctcagagtgtgggtccttcaaacaatgtaaaccaccatcttctattcaaatgaagtgagtcatgtgtgatttaagttcaggcagcacatcaatttctaaatactttttgtttattttatgaaagatatagtgagctgtttattttctagtttcctttagaatattttagccactcaaagtcaacatttgagatatgttgaattaacataatatatgtaaagtagaataagccttcaaattataaaccaagggtcaattgtaactaatactactgtgtgtgcattgaagattttattttacccttgatcttaacaaagcctttgctttgttatcaaatggactttcagtgcttttactatctgtgttttatggtttcatgtaacatacatattcctggtgtagcacttaactccttttccactttaaatttgtttttgttttttgagacggagtttcactcttgtcacccaggctggagtacagtggcacgatctcggcttatggcaacctccgcctcccgggttcaagtgattctcctgcttcagcttcccgagtagctgggattacaggcacacactaccacgcctggctaatttttgtatttttattatagacgggtttcaccatgttggccagactggtcttgaactcttgacctcaggtgatccacccacctcagcctcccaaagtgctgggattacaggcatgagccattgcgcccggccttaaatgttttttttaatcatcaaaaagaacaacatatctcaggttgtctaagtgtttttatgtaaaaccaacaaaaagaacaaatcagcttatattttttatcttgatgactcctgctccagaattgctagactaagaattaggtggctacagatggtagaactaaacaataagcaagagacaataataatggcccttaattattaacaaagtgccagagtctaggctaagcactttatctatatctcatttcattctcacaacttataagtgaatgagtaaactgagacttaagggaactgaatcacttaaatgtcacctggctaactgatggcagagccagagcttgaattcatgttggtctgacatcaaggtctttggtcttctccctacaccaagttacctacaagaacaatgacaccacactctgcctgaaggctcacacctcataccagcatacgctcaccttacagggaaatgggtttatccaggatcatgagacattagggtagatgaaaggagagctttgcagataacaaaatagcctatccttaataaatcctccactctctggaaggagactgaggggctttgtaaaacattagtcagttgctcatttttatgggattgcttagctgggctgtaaagatgaaggcatcaaataaactcaaagtatttttaaatttttttgataatagagaaacttcgctaaccaactgttctttcttgagtgtatagccccatcttgtggtaacttgctgcttctgcacttcatatccatatttcctattgttcactttattctgtagagcagcctgccaagaattttatttctgctgttttttttgctgctaaagaaaggaactaagtcaggatgttaacagaaaagtccacataaccctagaattcttagtcaaggaataattcaagtcagcctagagaccatgttgactttcctcatgtgtttccttatgactcagtaagttggcaaggtcctgactttagtcttaataaaacattgaattgtagtaaaggtttttgcaataaaaacttactttgg

SEQ ID NO: 44 - DNA, 1858 bp, Mus sp.
attccggaggtgaaaaacaatggcacaacgtgtataatggccagcttctctgcctcctttctgaccacctacgagactgcgaatggttctcagatcgtgaacatttccctgccagcctctgcagaagtactgaaaaatggcagttcttgtggtaaagaaaatgtttctgaccccagcctcacaattacttttggaagaggatatttactgacactcaacttcacaaaaaatacaacacgttacagtgtccagcatatgtattttacatataacttgtcagatacagaacattttcccaatgccatcagcaaagagatctacaccatggattccacaactgacatcaaggcagacatcaacaaagcataccggtgtgtcagtgatatccgggtctacatgaagaatgtgaccgttgtgctccgggatgccactatccaggcctacctgtcgagtggcaacttcagcaaggaagagacacactgcacacaggatggaccttccccaaccactgggccacccagcccctcaccaccacttgtgcccacaaaccccactgtatccaagtacaatgttactggtaacaacggaacctgcctgctggcctctatggcactgcaactgaatatcacctacctgaaaaaggacaacaagacggtgaccagagcgttcaacatcagcccaaatgacacatctagtgggagttgcggtatcaacttggtgaccctgaaagtggagaacaagaacagagccctggaattgcagtttgggatgaatgccagctctagcctgtttttcttgcaaggagtgcgcttgaatatgactcttcctgatgccctagtgcccacattcagcatctccaaccattcactgaaagctcttcaggccactgtgggaaactcatacaagtgcaacactgaggaacacatctttgtcagcaagatgctctccctcaatgtcttcagtgtgcaggtccaggctttcaaggtggacagtgacaggtttgggtctgtggaagagtgtgttcaggatggtaacaacatgttgatccccattgctgtgggcggtgccctggcagggctgatcctcatcgtcctcattgcctacctcattggcaggaagaggagtcacgccggctatcagaccatctagcctggtgggcaggtgcaccagagatgcacaggggcctgttctcacatccccaagcttagataggtgtggaagggaggcacactttctggcaaactgttttaaaatctgctttatcaaatgtgaagttcatcttgcaacatttactatgcacaaaggaataactattgaaatgacggtgttaattttgctaactgggttaaatattgatgagaaggctccactgatttgacttttaagacttggtgtttggttcttcattcttttactcagatttaagcctatcaaagggatactctggtccagaccttggcctggcaagggtggctgatggttaggctgcacacacttaagaagcaacgggagcagggaaggcttgcacacaggcacgcacagggtcaacctctggacacttggcttgggctacctggccttgggggggctgaactctggcatctggctgggtacacacccccccaatttctgtgctctgccacccgtgagctgccactttcctaaatagaaaatggcattatttttatttacttttttgtaaagtgatttccagtcttgtgttggcgttcagggtggccctgtctctgcactgtgtacaataatagattcacactgctgacgtgtcttgcagcgtaggtgggttgtacactgggcatcagctcacgtaatgcattgcctgtaacgatgctaataaaaa

SEQ ID NO: 45 - DNA, 2339 bp, Homo sapiens
ggcccaaccgccgcccgcgcccccgctctccgcaccgtacccggccgcctcgcgccatggcggcccccggcagcgcccggcgacccctgctgctgctactgctgttgctgctgctcggcctcatgcattgtgcgtcagcagcaatgtttatggtgaaaaatggcaacgggaccgcgtgcataatggccaacttctctgctgccttctcagtgaactacgacaccaagagtggccctaagaacatgacctttgacctgccatcagatgccacagtggtgctcaaccgcagctcctgtggaaaagagaacacttctgaccccagtctcgtgattgcttttggaagaggacatacactcactctcaatttcacgagaaatgcaacacgttacagcgtccagctcatgagttttgtttataacttgtcagacacacaccttttccccaatgcgagctccaaagaaatcaagactgtggaatctataactgacatcagggcagatatagataaaaaatacagatgtgttagtggcacccaggtccacatgaacaacgtgaccgtaacgctccatgatgccaccatccaggcgtacctttccaacagcagcttcagcaggggagagacacgctgtgaacaagacaggccttccccaaccacagcgccccctgcgccacccagcccctcgccctcacccgtgcccaagagcccctctgtggacaagtacaacgtgagcggcaccaacgggacctgcctgctggccagcatggggctgcagctgaacctcacctatgagaggaaggacaacacgacggtgacaaggcttctcaacatcaaccccaacaagacctcggccagcgggagctgcggcgcccacctggtgactctggagctgcacagcgagggcaccaccgtcctgctcttccagttcgggatgaatgcaagttctagccggtttttcctacaaggaatccagttgaatacaattcttcctgacgccagagaccctgcctttaaagctgccaacggctccctgcgagcgctgcaggccacagtcggcaattcctacaagtgcaacgcggaggagcacgtccgtgtcacgaaggcgttttcagtcaatatattcaaagtgtgggtccaggctttcaaggtggaaggtggccagtttggctctgtggaggagtgtctgctggacgagaacagcatgctgatccccatcgctgtgggtggtgccctggcggggctggtcctcatcgtcctcatcgcctacctcgtcggcaggaagaggagtcacgcaggctaccagactatctagcctggtgcacgcaggcacagcagctgcaggggcctctgttcctttctctgggcttagggtcctgtcgaaggggaggcacactttctggcaaacgtttctcaaatctgcttcatccaatgtgaagttcatcttgcagcatttactatgcacaacagagtaactatcgaaatgacggtgttaattttgctaactgggttaaatattttgctaactggttaaacattaatatttaccaaagtaggattttgagggtgggggtgctctctctgagggggtgggggtgccgctgtctctgaggggtgggggtgccgctgtctctgaggggtgggggtgccgctctctctgagggggtgggggtgccgctttctctgagggggtgggggtgccgctctctctgagggggtgggggtgctgctctctccgaggggtggaatgccgctgtctctgaggggtgggggtgccgctctaaattggctccatatcatttgagtttagggttctggtgtttggtttcttcattctttactgcactcagatttaagccttacaaagggaaagcctctggccgtcacacgtaggacgcatgaaggtcactcgtggtgaggctgacatgctcacacattacaacagtagagagggaaaatcctaagacagaggaactccagagatgagtgtctggagcgcttcagttcagctttaaaggccaggacgggccacacgtggctggcggcctcgttccagtggcggcacgtccttgggcgtctctaatgtctgcagctcaagggctggcacttttttaaatataaaaatgggtgttatttttatttttttttgtaaagtgatttttggtcttctgttgacattcggggtgatcctgttctgcgctgtgtacaatgtgagatcggtgcgttctcctgatgttttgccgtggcttggggattgtacacgggaccagctcacgtaatgcattgcctgtaacaatgtaataaaaagcctctttcttttaaaaaaaaaaaaaaaaaaaaaaaa

SEQ ID NO: 46 - DNA, 45 bp, Artificial Sequence
  Description of Artificial Sequence: Synthetic oligonucleotide
cagtacatcaaggccaacagcaagttcatcggcatcaccgaactc

SEQ ID NO: 47 - protein, 15 aa, Artificial Sequence
  Description of Artificial Sequence: Synthetic peptide
QYIKANSKFIGITEL

SEQ ID NO: 48 - DNA, 39 bp, Artificial Sequence
  Description of Artificial Sequence: Synthetic oligonucleotide
gctaaatttgtggctgcctggacactgaaagccgccgct

SEQ ID NO: 49 - protein, 13 aa, Artificial Sequence
  Description of Artificial Sequence: Synthetic peptide
AKFVAAWTLKAAA

SEQ ID NO: 50 - DNA, 593 bp, Woodchuck hepatitis virus
aatcaacctctggattacaaaatttgtgaaagattgactggtattcttaactatgttgctccttttacgctatgtggatacgctgctttaatgcctttgtatcatgctattgcttcccgtatggctttcattttctcctccttgtataaatcctggttgctgtctctttatgaggagttgtggcccgttgtcaggcaacgtggcgtggtgtgcactgtgtttgctgacgcaacccccactggttggggcattgccaccacctgtcagctcctttccgggactttcgctttccccctccctattgccacggcggaactcatcgccgcctgccttgcccgctgctggacaggggctcggctgttgggcactgacaattccgtggtgttgtcggggaagctgacgtcctttccatggctgctcgcctgtgttgccacctggattctgcgcgggacgtccttctgctacgtcccttcggccctcaatccagcggaccttccttcccgcggcctgctgccggctctgcggcctcttccgcgtcttcgccttcgccctcagacgagtcggatctccctttgggccgcctccccgcctgt

SEQ ID NO: 51 - DNA, 589 bp, Artificial Sequence
  Description of Artificial Sequence: Synthetic polynucleotide
tctcccccccccccctctccctcccccccccctaacgttactggccgaagccgcttggaataaggccggtgtgcgtttgtctatatgttattttccaccatattgccgtcttttggcaatgtgagggcccggaaacctggccctgtcttcttgacgagcattcctaggggtctttcccctctcgccaaaggaatgcaaggtctgttgaatgtcgtgaaggaagcagttcctctggaagcttcttgaagacaaacaacgtctgtagcgaccctttgcaggcagcggaaccccccacctggcgacaggtgcctctgcggccaaaagccacgtgtataagatacacctgcaaaggcggcacaaccccagtgccacgttgtgagttggatagttgtggaaagagtcaaatggctctcctcaagcgtattcaacaaggggctgaaggatgcccagaaggtaccccattgtatgggatctgatctggggcctcggtgcacatgctttacatgtgtttagtcgaggttaaaaaaacgtctaggccccccgaaccacggggacgtggttttcctttgaaaaacacgatgataatatg

SEQ ID NO: 52 - DNA, 720 bp, Artificial Sequence
  Description of Artificial Sequence: Synthetic polynucleotide
atggtgagcaagggcgaggagctgttcaccggggtggtgcccatcctggtcgagctggacggcgacgtaaacggccacaagttcagcgtgtccggcgagggcgagggcgatgccacctacggcaagctgaccctgaagttcatctgcaccaccggcaagctgcccgtgccctggcccaccctcgtgaccaccctgacctacggcgtgcagtgcttcagccgctaccccgaccacatgaagcagcacgacttcttcaagtccgccatgcccgaaggctacgtccaggagcgcaccatcttcttcaaggacgacggcaactacaagacccgcgccgaggtgaagttcgagggcgacaccctggtgaaccgcatcgagctgaagggcatcgacttcaaggaggacggcaacatcctggggcacaagctggagtacaactacaacagccacaacgtctatatcatggccgacaagcagaagaacggcatcaaggtgaacttcaagatccgccacaacatcgaggacggcagcgtgcagctcgccgaccactaccagcagaacacccccatcggcgacggccccgtgctgctgcccgacaaccactacctgagcacccagtccgccctgagcaaagaccccaacgagaagcgcgatcacatggtcctgctggagttcgtgaccgccgccgggatcactctcggcatggacgagctgtacaagtag

SEQ ID NO: 53 - DNA, 1563 bp, Artificial Sequence
  Description of Artificial Sequence: Synthetic polynucleotide
atgctgctgctgctgctgctgctgggcctgaggctacagctctccctgggcatcatcccagttgaggaggagaacccggacttctggaaccgcgaggcagccgaggccctgggtgccgccaagaagctgcagcctgcacagacagccgccaagaacctcatcatcttcctgggcgatgggatgggggtgtctacggtgacagctgccaggatcctaaaagggcagaagaaggacaaactggggcctgagatacccctggccatggaccgcttcccatatgtggctctgtccaagacatacaatgtagacaaacatgtgccagacagtggagccacagccacggcctacctgtgcggggtcaagggcaacttccagaccattggcttgagtgcagccgcccgctttaaccagtgcaacacgacacgcggcaacgaggtcatctccgtgatgaatcgggccaagaaagcagggaagtcagtgggagtggtaaccaccacacgagtgcagcacgcctcgccagccggcacctacgcccacacggtgaaccgcaactggtactcggacgccgacgtgcctgcctcggcccgccaggaggggtgccaggacatcgctacgcagctcatctccaacatggacattgacgtgatcctaggtggaggccgaaagtacatgtttcgcatgggaaccccagaccctgagtacccagatgactacagccaaggtgggaccaggctggacgggaagaatctggtgcaggaatggctggcgaagcgccagggtgcccggtatgtgtggaaccgcactgagctcatgcaggcttccctggacccgtctgtgacccatctcatgggtctctttgagcctggagacatgaaatacgagatccaccgagactccacactggacccctccctgatggagatgacagaggctgccctgcgcctgctgagcaggaacccccgcggcttcttcctcttcgtggagggtggtcgcatcgaccatggtcatcatgaaagcagggcttaccgggcactgactgagacgatcatgttcgacgacgccattgagagggcgggccagctcaccagcgaggaggacacgctgagcctcgtcactgccgaccactcccacgtcttctccttcggaggctaccccctgcgagggagctccatcttcgggctggcccctggcaaggcccgggacaggaaggcctacacggtcctcctatacggaaacggtccaggctatgtgctcaaggacggcgcccggccggatgttaccgagagcgagagcgggagccccgagtatcggcagcagtcagcagtgcccctggacgaagagacccacgcaggcgaggacgtggcggtgttcgcgcgcggcccgcaggcgcacctggttcacggcgtgcaggagcagaccttcatagcgcacgtcatggccttcgccgcctgcctggagccctacaccgcctgcgacctggcgccccccgccggcaccaccgacgccgcgcacccgggttactctagagtcggggcggccggccgcttcgagcagacatgataa

SEQ ID NO: 54 - DNA, 1653 bp, Artificial Sequence
  Description of Artificial Sequence: Synthetic polynucleotide
atggaagatgccaaaaacattaagaagggcccagcgccattctacccactcgaagacgggaccgccggcgagcagctgcacaaagccatgaagcgctacgccctggtgcccggcaccatcgcctttaccgacgcacatatcgaggtggacattacctacgccgagtacttcgagatgagcgttcggctggcagaagctatgaagcgctatgggctgaatacaaaccatcggatcgtggtgtgcagcgagaatagcttgcagttcttcatgcccgtgttgggtgccctgttcatcggtgtggctgtggccccagctaacgacatctacaacgagcgcgagctgctgaacagcatgggcatcagccagcccaccgtcgtattcgtgagcaagaaagggctgcaaaagatcctcaacgtgcaaaagaagctaccgatcatacaaaagatcatcatcatggatagcaagaccgactaccagggcttccaaagcatgtacaccttcgtgacttcccatttgccacccggcttcaacgagtacgacttcgtgcccgagagcttcgaccgggacaaaaccatcgccctgatcatgaacagtagtggcagtaccggattgcccaagggcgtagccctaccgcaccgcaccgcttgtgtccgattcagtcatgcccgcgaccccatcttcggcaaccagatcatccccgacaccgctatcctcagcgtggtgccatttcaccacggcttcggcatgttcaccacgctgggctacttgatctgcggctttcgggtcgtgctcatgtaccgcttcgaggaggagctattcttgcgcagcttgcaagactataagattcaatctgccctgctggtgcccacactatttagcttcttcgctaagagcactctcatcgacaagtacgacctaagcaacttgcacgagatcgccagcggcggggcgccgctcagcaaggaggtaggtgaggccgtggccaaacgcttccacctaccaggcatccgccagggctacggcctgacagaaacaaccagcgccattctgatcacccccgaaggggacgacaagcctggcgcagtaggcaaggtggtgcccttcttcgaggctaaggtggtggacttggacaccggtaagacactgggtgtgaaccagcgcggcgagctgtgcgtccgtggccccatgatcatgagcggctacgttaacaaccccgaggctacaaacgctctcatcgacaaggacggctggctgcacagcggcgacatcgcctactgggacgaggacgagcacttcttcatcgtggaccggctgaagagcctgatcaaatacaagggctaccaggtagccccagccgaactggagagcatcctgctgcaacaccccaacatcttcgacgccggggtcgccggcctgcccgacgacgatgccggcgagctgcccgccgcagtcgtcgtgctggaacacggtaaaaccatgaccgagaaggagatcgtggactatgtggccagccaggttacaaccgccaagaagctgcgcggtggtgttgtgttcgtggacgaggtgcctaaaggactgaccggcaagttggacgcccgcaagatccgcgagattctcattaaggccaagaagggcggcaagatcgccgtgtaa

SEQ ID NO: 55 - DNA, 66 bp, Foot-and-mouth disease virus
gtaaagcaaacactgaactttgaccttctcaagttggctggagacgttgagtccaatcctgggccc

SEQ ID NO: 56 - protein, 5 aa, Artificial Sequence
  Description of Artificial Sequence: Synthetic peptide
GPGPG

SEQ ID NO: 57 - DNA, 34363 bp, Artificial Sequence
  Description of Artificial Sequence: Synthetic polynucleotide
catcatcaataatatacctcaaactttttgtgcgcgttaatatgcaaatgaggcgtttgaatttggggaggaagggcggtgattggtcgagggatgagcgaccgttaggggcggggcgagtgacgttttgatgacgtggttgcgaggaggagccagtttgcaagttctcgtgggaaaagtgacgtcaaacgaggtgtggtttgaacacggaaatactcaattttcccgcgctctctgacaggaaatgaggtgtttctgggcggatgcaagtgaaaacgggccattttcgcgcgaaaactgaatgaggaagtgaaaatctgagtaatttcgcgtttatggcagggaggagtatttgccgagggccgagtagactttgaccgattacgtgggggtttcgattaccgtgtttttcacctaaatttccgcgtacggtgtcaaagtccggtgtttttacgtaggtgtcagctgatcgccagggtatttaaacctgcgctctccagtcaagaggccactcttgagtgccagcgagaagagttttctcctccgcgccgcgagtcagatctacactttgaaagtagggataacagggtaatgacattgattattgactagttgttaatagtaatcaattacggggtcattagttcatagcccatatatggagttccgcgttacataacttacggtaaatggcccgcctggctgaccgcccaacgacccccgcccattgacgtcaataatgacgtatgttcccatagtaacgccaatagggactttccattgacgtcaatgggtggagtatttacggtaaactgcccacttggcagtacatcaagtgtatcatatgccaagtccgccccctattgacgtcaatgacggtaaatggcccgcctggcattatgcccagtacatgaccttacgggactttcctacttggcagtacatctacgtattagtcatcgctattaccatggtgatgcggttttggcagtacaccaatgggcgtggatagcggtttgactcacggggatttccaagtctccaccccattgacgtcaatgggagtttgttttggcaccaaaatcaacgggactttccaaaatgtcgtaataaccccgccccgttgacgcaaatgggcggtaggcgtgtacggtgggaggtctatataagcagagctcgtttagtgaaccgtcagatcgcctggaacgccatccacgctgttttgacctccatagaagacagcgatcgcgccaccatggccgggatgttccaggcactgtccgaaggctgcacaccctatgatattaaccagatgctgaatgtcctgggagaccaccaggtctctggcctggagcagctggagagcatcatcaacttcgagaagctgaccgagtggacaagctccaatgtgatgcctatcctgtccccactgaccaagggcatcctgggcttcgtgtttaccctgacagtgccttctgagcggggcctgtcttgcatcagcgaggcagacgcaaccacaccagagtccgccaatctgggcgaggagatcctgtctcagctgtacctgtggccccgggtgacatatcactccccttcttacgcctatcaccagttcgagcggagagccaagtacaagagacacttcccaggctttggccagtctctgctgttcggctaccccgtgtacgtgttcggcgattgcgtgcagggcgactgggatgccatccggtttagatactgcgcaccacctggatatgcactgctgaggtgtaacgacaccaattattccgccctgctggcagtgggcgccctggagggccctcgcaatcaggattggctgggcgtgccaaggcagctggtgacacgcatgcaggccatccagaacgcaggcctgtgcaccctggtggcaatgctggaggagacaatcttctggctgcaggcctttctgatggccctgaccgacagcggccccaagacaaacatcatcgtggattcccagtacgtgatgggcatctccaagccttctttccaggagtttgtggactgggagaacgtgagcccagagctgaattccaccgatcagccattctggcaggcaggaatcctggcaaggaacctggtgcctatggtggccacagtgcagggccagaatctgaagtaccagggccagagcctggtcatcagcgcctccatcatcgtgtttaacctgctggagctggagggcgactatcgggacgatggcaacgtgtgggtgcacaccccactgagccccagaacactgaacgcctgggtgaaggccgtggaggagaagaagggcatcccagtgcacctggagctggcctccatgaccaatatggagctgatgtctagcatcgtgcaccagcaggtgaggacatacggacccgtgttcatgtgcctgggaggcctgctgaccatggtggcaggagccgtgtggctgacagtgcgggtgctggagctgttcagagccgcccagctggccaacgatgtggtgctgcagatcatggagctgtgcggagcagcctttcgccaggtgtgccacaccacagtgccatggcccaatgcctccctgacccccaagtggaacaatgagacaacacagcctcagatcgccaactgtagcgtgtacgacttcttcgtgtggctgcactactatagcgtgagggataccctgtggccccgcgtgacataccacatgaataagtacgcctatcacatgctggagaggcgcgccaagtataagagaggccctggcccaggcgcaaagtttgtggcagcatggaccctgaaggccgccgccggccccggccccggccagtatatcaaggctaacagtaagttcattggaatcacagagctgggacccggacctggataatgagtttaaaccgttactggccgaagccgcttggaataaggccggtgtgcgtttgtctatatgttattttccaccatattgccgtcttttggcaatgtgagggcccggaaacctggccctgtcttcttgacgagcattcctaggggtctttcccctctcgccaaaggaatgcaaggtctgttgaatgtcgtgaaggaagcagttcctctggaagcttcttgaagacaaacaacgtctgtagcgaccctttgcaggcagcggaaccccccacctggcgacaggtgcctctgcggccaaaagccacgtgtataagatacacctgcaaaggcggcacaaccccagtgccacgttgtgagttggatagttgtggaaagagtcaaatggctctcctcaagcgtattcaacaaggggctgaaggatgcccagaaggtaccccattgtatgggatctgatctggggcctcggtgcacatgctttacatgtgtttagtcgaggttaaaaaacgtctaggccccccgaaccacggggacgtggttttcctttgaaaaacacgatgataatatgggatggagctggatctttctcttcctcctgtcaggaactgcaggagtgcattctgaggccaagttacaggagtctggacctgtgctggttaaacctggagcttctgtgaagatgagctgtaaggccagcggctacacctttaccgactactacatgaactgggtgaagcagtctcacggaaagtctctggagtggatcggcgtgatcaacccctacaatggcgatacaagctacaaccagaagttcaagggcaaggccaccctgaccgtggataagagcagctctacagcctatatggagctgaatagcctgacaagcgaggattctgccgtgtactactgcgcccggtattatggcagctggtttgcctattggggacaaggaacactgattaccgtgtctacagccaaaacaacacccccatcagtctatccactggcccctgggtgtggagatacaactggttcctccgtgactctgggatgcctggtcaagggctacttccctgagtcagtgactgtgacttggaactctggatccctgtccagcagtgtgcacaccttcccagctctcctgcagtctggactctacactatgagcagctcagtgactgtcccctccagcacctggccaagtcagaccgtcacctgcagcgttgctcacccagccagcagcaccacggtggacaaaaaacttgagcccagcgggcccatttcaacaatcaacccctgtcctccatgcaaggagtgtcacaaatgcccagctcctaacctggagggtggaccatccgtcttcatcttccctccaaatatcaaggatgtactcatgatctccctgacacccaaggtcacgtgtgtggtggtggatgtgagcgaggatgacccagacgtccagatcagctggtttgtgaacaacgtggaagtacacacagctcagacacaaacccatagagaggattacaacagtactatccgggtggtcagcaccctccccatccagcaccaggactggatgagtggcaaggagttcaaatgcaaggtcaacaacaaagacctcccatcacccatcgagagaaccatctcaaaaattaaagggctagtcagagctccacaagtatacatcttgccgccaccagcagagcagttgtccaggaaagatgtcagtctcacttgcctggtcgtgggcttcaaccctggagacatcagtgtggagtggaccagcaatgggcatacagaggagaactacaaggacaccgcaccagtcctggactctgacggttcttacttcatatatagcaagctcaatatgaaaacaagcaagtgggagaaaacagattccttctcatgcaacgtgagacacgagggtctgaaaaattactacctgaagaagaccatctcccggtctccgggtaaacgcaaacggagaggcgtcagagctgaaggtagaggctctttgctcacctgtggagatgtggaagagaaccctggacccatgaagttgcctgttaggctgttggtgctgatgttctggattcctggagctagatgcgatatcgtgatgacccagacaacactgtctctgcctgtgtctctgggagatcaggcctctatcagctgtagatctagccagagcattgtgcactctaacggcaacacctacctggagtggtacctgcagaaaccaggacaaagccctaagctgctgatctacaaagtgagcaaccggtttagcggcgtgcccgacagattttctggatctggctctggcaccgattttacactgaagatcagcagagtggaggccgaggatctgggagtgtactactgctttcagggctctcatgtgccttacacatttggaggaggaaccaagctggagatcaagcgggctgatgctgcaccaactgtatccatcttcccaccatccagtgagcagttaacatctggaggtgcctcagtcgtgtgcttcttgaacaacttctaccccaaagacatcaatgtcaagtggaagattgatggcagtgaacgacaaaatggcgtcctgaacagttggactgatcaggacagcaaagacagcacctacagcatgagcagcaccctcacgttgaccaaggacgagtatgaacgacataacagctatacctgtgaggccactcacaagacatcaacttcacccattgtcaagagcttcaacaggaatgagtgttgatagatttaaatgtgagggttaatgcttcgagcagacatgataagatacattgatgagtttggacaaaccacaactagaatgcagtgaaaaaaatgctttatttgtgaaatttgtgatgctattgctttatttgtaaccattataagctgcaataaacaagttaacaacaacaattgcattcattttatgtttcaggttcagggggagatgtgggaggttttttaaagcaagtaaaacctctacaaatgtggtaaaataactataacggtcctaaggtagcgagtgagtagtgttctggggcgggggaggacctgcatgagggccagaataactgaaatctgtgcttttctgtgtgttgcagcagcatgagcggaagcggctcctttgagggaggggtattcagcccttatctgacggggcgtctcccctcctgggcgggagtgcgtcagaatgtgatgggatccacggtggacggccggcccgtgcagcccgcgaactcttcaaccctgacctatgcaaccctgagctcttcgtcgttggacgcagctgccgccgcagctgctgcatctgccgccagcgccgtgcgcggaatggccatgggcgccggctactacggcactctggtggccaactcgagttccaccaataatcccgccagcctgaacgaggagaagctgttgctgctgatggcccagctcgaggccttgacccagcgcctgggcgagctgacccagcaggtggctcagctgcaggagcagacgcgggccgcggttgccacggtgaaatccaaataaaaaatgaatcaataaataaacggagacggttgttgattttaacacagagtctgaatctttatttgatttttcgcgcgcggtaggccctggaccaccggtctcgatcattgagcacccggtggatcttttccaggacccggtagaggtgggcttggatgttgaggtacatgggcatgagcccgtcccgggggtggaggtagctccattgcagggcctcgtgctcgggggtggtgttgtaaatcacccagtcatagcaggggcgcagggcatggtgttgcacaatatctttgaggaggagactgatggccacgggcagccctttggtgtaggtgtttacaaatctgttgagctgggagggatgcatgcggggggagatgaggtgcatcttggcctggatcttgagattggcgatgttaccgcccagatcccgcctggggttcatgttgtgcaggaccaccagcacggtgtatccggtgcacttggggaatttatcatgcaacttggaagggaaggcgtgaaagaatttggcgacgcctttgtgcccgcccaggttttccatgcactcatccatgatgatggcgatgggcccgtgggcggcggcctgggcaaagacgtttcgggggtcggacacatcatagttgtggtcctgggtgaggtcatcataggccattttaatgaatttggggcggagggtgccggactgggggacaaaggttccctcgatcccgggggcgtagttcccctcacagatctgcatctcccaggctttgagctcggagggggggatcatgtccacctgcggggcgataaagaacacggtttccggggcgggggagatgagctgggccgaaagcaagttccggagcagctgggacttgccgcagccggtggggccgtagatgaccccgatgaccggctgcaggtggtagttgagggagagacagctgccgtcctcccggaggaggggggccacctcgttcatcatctcgcgcacgtgcatgttctcgcgcaccagttccgccaggaggcgctctccccccagggataggagctcctggagcgaggcgaagtttttcagcggcttgagtccgtcggccatgggcattttggagagggtttgttgcaagagttccaggcggtcccagagctcggtgatgtgctctacggcatctcgatccagcagacctcctcgtttcgcgggttgggacggctgcgggagtagggcaccagacgatgggcgtccagcgcagccagggtccggtccttccagggtcgcagcgtccgcgtcagggtggtctccgtcacggtgaaggggtgcgcgccgggctgggcgcttgcgagggtgcgcttcaggctcatccggctggtcgaaaaccgctcccgatcggcgccctgcgcgtcggccaggtagcaattgaccatgagttcgtagttgagcgcctcggccgcgtggcctttggcgcggagcttacctttggaagtctgcccgcaggcgggacagaggagggacttgagggcgtagagcttgggggcgaggaagacggactcgggggcgtaggcgtccgcgccgcagtgggcgcagacggtctcgcactccacgagccaggtgaggtcgggctggtcggggtcaaaaaccagtttcccgccgttctttttgatgcgtttcttacctttggtctccatgagctcgtgtccccgctgggtgacaaagaggctgtccgtgtccccgtagaccgactttatgggccggtcctcgagcggtgtgccgcggtcctcctcgtagaggaaccccgcccactccgagacgaaagcccgggtccaggccagcacgaaggaggccacgtgggacgggtagcggtcgttgtccaccagcgggtccaccttttccagggtatgcaaacacatgtccccctcgtccacatccaggaaggtgattggcttgtaagtgtaggccacgtgaccgggggtcccggccgggggggtataaaagggtgcgggtccctgctcgtcctcactgtcttccggatcgctgtccaggagcgccagctgttggggtaggtattccctctcgaaggcgggcatgacctcggcactcaggttgtcagtttctagaaacgaggaggatttgatattgacggtgccggcggagatgcctttcaagagcccctcgtccatctggtcagaaaagacgatctttttgttgtcgagcttggtggcgaaggagccgtagagggcgttggagaggagcttggcgatggagcgcatggtctggtttttttccttgtcggcgcgctccttggcggcgatgttgagctgcacgtactcgcgcgccacgcacttccattcggggaagacggtggtcagctcgtcgggcacgattctgacctgccagccccgattatgcagggtgatgaggtccacactggtggccacctcgccgcgcaggggctcattagtccagcagaggcgtccgcccttgcgcgagcagaaggggggcagggggtccagcatgacctcgtcgggggggtcggcatcgatggtgaagatgccgggcaggaggtcggggtcaaagtagctgatggaagtggccagatcgtccagggcagcttgccattcgcgcacggccagcgcgcgctcgtagggactgaggggcgtgccccagggcatgggatgggtaagcgcggaggcgtacatgccgcagatgtcgtagacgtagaggggctcctcgaggatgccgatgtaggtggggtagcagcgccccccgcggatgctggcgcgcacgtagtcatacagctcgtgcgagggggcgaggagccccgggcccaggttggtgcgactgggcttttcggcgcggtagacgatctggcggaaaatggcatgcgagttggaggagatggtgggcctttggaagatgttgaagtgggcgtggggcagtccgaccgagtcgcggatgaagtgggcgtaggagtcttgcagcttggcgacgagctcggcggtgactaggacgtccagagcgcagtagtcgagggtctcctggatgatgtcatacttgagctgtcccttttgtttccacagctcgcggttgagaaggaactcttcgcggtccttccagtactcttcgagggggaacccgtcctgatctgcacggtaagagcctagcatgtagaactggttgacggccttgtaggcgcagcagcccttctccacggggagggcgtaggcctgggcggccttgcgcagggaggtgtgcgtgagggcgaaagtgtccctgaccatgaccttgaggaactggtgcttgaagtcgatatcgtcgcagcccccctgctcccagagctggaagtccgtgcgcttcttgtaggcggggttgggcaaagcgaaagtaacatcgttgaagaggatcttgcccgcgcggggcataaagttgcgagtgatgcggaaaggttggggcacctcggcccggttgttgatgacctgggcggcgagcacgatctcgtcgaagccgttgatgttgtggcccacgatgtagagttccacgaatcgcggacggcccttgacgtggggcagtttcttgagctcctcgtaggtgagctcgtcggggtcgctgagcccgtgctgctcgagcgcccagtcggcgagatgggggttggcgcggaggaaggaagtccagagatccacggccagggcggtttgcagacggtcccggtactgacggaactgctgcccgacggccattttttcgggggtgacgcagtagaaggtgcgggggtccccgtgccagcgatcccatttgagctggagggcgagatcgagggcgagctcgacgagccggtcgtccccggagagtttcatgaccagcatgaaggggacgagctgcttgccgaaggaccccatccaggtgtaggtttccacatcgtaggtgaggaagagcctttcggtgcgaggatgcgagccgatggggaagaactggatctcctgccaccaattggaggaatggctgttgatgtgatggaagtagaaatgccgacggcgcgccgaacactcgtgcttgtgtttatacaagcggccacagtgctcgcaacgctgcacgggatgcacgtgctgcacgagctgtacctgagttcctttgacgaggaatttcagtgggaagtggagtcgtggcgcctgcatctcgtgctgtactacgtcgtggtggtcggcctggccctcttctgcctcgatggtggtcatgctgacgagcccgcgcgggaggcaggtccagacctcggcgcgagcgggtcggagagcgaggacgagggcgcgcaggccggagctgtccagggtcctgagacgctgcggagtcaggtcagtgggcagcggcggcgcgcggttgacttgcaggagtttttccagggcgcgcgggaggtccagatggtacttgatctccaccgcgccattggtggcgacgtcgatggcttgcagggtcccgtgcccctggggtgtgaccaccgtcccccgtttcttcttgggcggctggggcgacgggggcggtgcctcttccatggttagaagcggcggcgaggacgcgcgccgggcggcaggggcggctcggggcccggaggcaggggcggcaggggcacgtcggcgccgcgcgcgggtaggttctggtactgcgcccggagaagactggcgtgagcgacgacgcgacggttgacgtcctggatctgacgcctctgggtgaaggccacgggacccgtgagtttgaacctgaaagagagttcgacagaatcaatctcggtatcgttgacggcggcctgccgcaggatctcttgcacgtcgcccgagttgtcctggtaggcgatctcggtcatgaactgctcgatctcctcctcttgaaggtctccgcggccggcgcgctccacggtggccgcgaggtcgttggagatgcggcccatgagctgcgagaaggcgttcatgcccgcctcgttccagacgcggctgtagaccacgacgccctcgggatcgcgggcgcgcatgaccacctgggcgaggttgagctccacgtggcgcgtgaagaccgcgtagttgcagaggcgctggtagaggtagttgagcgtggtggcgatgtgctcggtgacgaagaaatacatgatccagcggcggagcggcatctcgctgacgtcgcccagcgcctccaaacgttccatggcctcgtaaaagtccacggcgaagttgaaaaactgggagttgcgcgccgagacggtcaactcctcctccagaagacggatgagctcggcgatggtggcgcgcacctcgcgctcgaaggcccccgggagttcctccacttcctcttcttcctcctccactaacatctcttctacttcctcctcaggcggcagtggtggcgggggagggggcctgcgtcgccggcggcgcacgggcagacggtcgatgaagcgctcgatggtctcgccgcgccggcgtcgcatggtctcggtgacggcgcgcccgtcctcgcggggccgcagcgtgaagacgccgccgcgcatctccaggtggccgggggggtccccgttgggcagggagagggcgctgacgatgcatcttatcaattgccccgtagggactccgcgcaaggacctgagcgtctcgagatccacgggatctgaaaaccgctgaacgaaggcttcgagccagtcgcagtcgcaaggtaggctgagcacggtttcttctggcgggtcatgttggttgggagcggggcgggcgatgctgctggtgatgaagttgaaataggcggttctgagacggcggatggtggcgaggagcaccaggtctttgggcccggcttgctggatgcgcagacggtcggccatgccccaggcgtggtcctgacacctggccaggtccttgtagtagtcctgcatgagccgctccacgggcacctcctcctcgcccgcgcggccgtgcatgcgcgtgagcccgaagccgcgctggggctggacgagcgccaggtcggcgacgacgcgctcggcgaggatggcttgctggatctgggtgagggtggtctggaagtcatcaaagtcgacgaagcggtggtaggctccggtgttgatggtgtaggagcagttggccatgacggaccagttgacggtctggtggcccggacgcacgagctcgtggtacttgaggcgcgagtaggcgcgcgtgtcgaagatgtagtcgttgcaggtgcgcaccaggtactggtagccgatgaggaagtgcggcggcggctggcggtagagcggccatcgctcggtggcgggggcgccgggcgcgaggtcctcgagcatggtgcggtggtagccgtagatgtacctggacatccaggtgatgccggcggcggtggtggaggcgcgcgggaactcgcggacgcggttccagatgttgcgcagcggcaggaagtagttcatggtgggcacggtctggcccgtgaggcgcgcgcagtcgtggatgctctatacgggcaaaaacgaaagcggtcagcggctcgactccgtggcctggaggctaagcgaacgggttgggctgcgcgtgtaccccggttcgaatctcgaatcaggctggagccgcagctaacgtggtattggcactcccgtctcgacccaagcctgcaccaaccctccaggatacggaggcgggtcgttttgcaacttttttttggaggccggatgagactagtaagcgcggaaagcggccgaccgcgatggctcgctgccgtagtctggagaagaatcgccagggttgcgttgcggtgtgccccggttcgaggccggccggattccgcggctaacgagggcgtggctgccccgtcgtttccaagaccccatagccagccgacttctccagttacggagcgagcccctcttttgttttgtttgtttttgccagatgcatcccgtactgcggcagatgcgcccccaccaccctccaccgcaacaacagccccctccacagccggcgcttctgcccccgccccagcagcaacttccagccacgaccgccgcggccgccgtgagcggggctggacagagttatgatcaccagctggccttggaagagggcgaggggctggcgcgcctgggggcgtcgtcgccggagcggcacccgcgcgtgcagatgaaaagggacgctcgcgaggcctacgtgcccaagcagaacctgttcagagacaggagcggcgaggagcccgaggagatgcgcgcggcccggttccacgcggggcgggagctgcggcgcggcctggaccgaaagagggtgctgagggacgaggatttcgaggcggacgagctgacggggatcagccccgcgcgcgcgcacgtggccgcggccaacctggtcacggcgtacgagcagaccgtgaaggaggagagcaacttccaaaaatccttcaacaaccacgtgcgcaccctgatcgcgcgcgaggaggtgaccctgggcctgatgcacctgtgggacctgctggaggccatcgtgcagaaccccaccagcaagccgctgacggcgcagctgttcctggtggtgcagcatagtcgggacaacgaagcgttcagggaggcgctgctgaatatcaccgagcccgagggccgctggctcctggacctggtgaacattctgcagagcatcgtggtgcaggagcgcgggctgccgctgtccgagaagctggcggccatcaacttctcggtgctgagtttgggcaagtactacgctaggaagatctacaagaccccgtacgtgcccatagacaaggaggtgaagatcgacgggttttacatgcgcatgaccctgaaagtgctgaccctgagcgacgatctgggggtgtaccgcaacgacaggatgcaccgtgcggtgagcgccagcaggcggcgcgagctgagcgaccaggagctgatgcatagtctgcagcgggccctgaccggggccgggaccgagggggagagctactttgacatgggcgcggacctgcactggcagcccagccgccgggccttggaggcggcggcaggaccctacgtagaagaggtggacgatgaggtggacgaggagggcgagtacctggaagactgatggcgcgaccgtatttttgctagatgcaacaacaacagccacctcctgatcccgcgatgcgggcggcgctgcagagccagccgtccggcattaactcctcggacgattggacccaggccatgcaacgcatcatggcgctgacgacccgcaaccccgaagcctttagacagcagccccaggccaaccggctctcggccatcctggaggccgtggtgccctcgcgctccaaccccacgcacgagaaggtcctggccatcgtgaacgcgctggtggagaacaaggccatccgcggcgacgaggccggcctggtgtacaacgcgctgctggagcgcgtggcccgctacaacagcaccaacgtgcagaccaacctggaccgcatggtgaccgacgtgcgcgaggccgtggcccagcgcgagcggttccaccgcgagtccaacctgggatccatggtggcgctgaacgccttcctcagcacccagcccgccaacgtgccccggggccaggaggactacaccaacttcatcagcgccctgcgcctgatggtgaccgaggtgccccagagcgaggtgtaccagtccgggccggactacttcttccagaccagtcgccagggcttgcagaccgtgaacctgagccaggctttcaagaacttgcagggcctgtggggcgtgcaggccccggtcggggaccgcgcgacggtgtcgagcctgctgacgccgaactcgcgcctgctgctgctgctggtggcccccttcacggacagcggcagcatcaaccgcaactcgtacctgggctacctgattaacctgtaccgcgaggccatcggccaggcgcacgtggacgagcagacctaccaggagatcacccacgtgagccgcgccctgggccaggacgacccgggcaacctggaagccaccctgaactttttgctgaccaaccggtcgcagaagatcccgccccagtacgcgctcagcaccgaggaggagcgcatcctgcgttacgtgcagcagagcgtgggcctgttcctgatgcaggagggggccacccccagcgccgcgctcgacatgaccgcgcgcaacatggagcccagcatgtacgccagcaaccgcccgttcatcaataaactgatggactacttgcatcgggcggccgccatgaactctgactatttcaccaacgccatcctgaatccccactggctcccgccgccggggttctacacgggcgagtacgacatgcccgaccccaatgacgggttcctgtgggacgatgtggacagcagcgtgttctccccccgaccgggtgctaacgagcgccccttgtggaagaaggaaggcagcgaccgacgcccgtcctcggcgctgtccggccgcgagggtgctgccgcggcggtgcccgaggccgccagtcctttcccgagcttgcccttctcgctgaacagtatccgcagcagcgagctgggcaggatcacgcgcccgcgcttgctgggcgaagaggagtacttgaatgactcgctgttgagacccgagcgggagaagaacttccccaataacgggatagaaagcctggtggacaagatgagccgctggaagacgtatgcgcaggagcacagggacgatccccgggcgtcgcagggggccacgagccggggcagcgccgcccgtaaacgccggtggcacgacaggcagcggggacagatgtgggacgatgaggactccgccgacgacagcagcgtgttggacttgggtgggagtggtaacccgttcgctcacctgcgcccccgtatcgggcgcatgatgtaagagaaaccgaaaataaatgatactcaccaaggccatggcgaccagcgtgcgttcgtttcttctctgttgttgttgtatctagtatgatgaggcgtgcgtacccggagggtcctcctccctcgtacgagagcgtgatgcagcaggcgatggcggcggcggcgatgcagcccccgctggaggctccttacgtgcccccgcggtacctggcgcctacggaggggcggaacagcattcgttactcggagctggcacccttgtacgataccacccggttgtacctggtggacaacaagtcggcggacatcgcctcgctgaactaccagaacgaccacagcaacttcctgaccaccgtggtgcagaacaatgacttcacccccacggaggccagcacccagaccatcaactttgacgagcgctcgcggtggggcggccagctgaaaaccatcatgcacaccaacatgcccaacgtgaacgagttcatgtacagcaacaagttcaaggcgcgggtgatggtctcccgcaagacccccaatggggtgacagtgacagaggattatgatggtagtcaggatgagctgaagtatgaatgggtggaatttgagctgcccgaaggcaacttctcggtgaccatgaccatcgacctgatgaacaacgccatcatcgacaattacttggcggtggggcggcagaacggggtgctggagagcgacatcggcgtgaagttcgacactaggaacttcaggctgggctgggaccccgtgaccgagctggtcatgcccggggtgtacaccaacgaggctttccatcccgatattgtcttgctgcccggctgcggggtggacttcaccgagagccgcctcagcaacctgctgggcattcgcaagaggcagcccttccaggaaggcttccagatcatgtacgaggatctggaggggggcaacatccccgcgctcctggatgtcgacgcctatgagaaaagcaaggaggatgcagcagctgaagcaactgcagccgtagctaccgcctctaccgaggtcaggggcgataattttgcaagcgccgcagcagtggcagcggccgaggcggctgaaaccgaaagtaagatagtcattcagccggtggagaaggatagcaagaacaggagctacaacgtactaccggacaagataaacaccgcctaccgcagctggtacctagcctacaactatggcgaccccgagaagggcgtgcgctcctggacgctgctcaccacctcggacgtcacctgcggcgtggagcaagtctactggtcgctgcccgacatgatgcaagacccggtcaccttccgctccacgcgtcaagttagcaactacccggtggtgggcgccgagctcctgcccgtctactccaagagcttcttcaacgagcaggccgtctactcgcagcagctgcgcgccttcacctcgcttacgcacgtcttcaaccgcttccccgagaaccagatcctcgtccgcccgcccgcgcccaccattaccaccgtcagtgaaaacgttcctgctctcacagatcacgggaccctgccgctgcgcagcagtatccggggagtccagcgcgtgaccgttactgacgccagacgccgcacctgcccctacgtctacaaggccctgggcatagtcgcgccgcgcgtcctctcgagccgcaccttctaaatgtccattctcatctcgcccagtaataacaccggttggggcctgcgcgcgcccagcaagatgtacggaggcgctcgccaacgctccacgcaacaccccgtgcgcgtgcgcgggcacttccgcgctccctggggcgccctcaagggccgcgtgcggtcgcgcaccaccgtcgacgacgtgatcgaccaggtggtggccgacgcgcgcaactacacccccgccgccgcgcccgtctccaccgtggacgccgtcatcgacagcgtggtggccgacgcgcgccggtacgcccgcgccaagagccggcggcggcgcatcgcccggcggcaccggagcacccccgccatgcgcgcggcgcgagccttgctgcgcagggccaggcgcacgggacgcagggccatgctcagggcggccagacgcgcggcttcaggcgccagcgccggcaggacccggagacgcgcggccacggcggcggcagcggccatcgccagcatgtcccgcccgcggcgagggaacgtgtactgggtgcgcgacgccgccaccggtgtgcgcgtgcccgtgcgcacccgcccccctcgcacttgaagatgttcacttcgcgatgttgatgtgtcccagcggcgaggaggatgtccaagcgcaaattcaaggaagagatgctccaggtcatcgcgcctgagatctacggccctgcggtggtgaaggaggaaagaaagccccgcaaaatcaagcgggtcaaaaaggacaaaaaggaagaagaaagtgatgtggacggattggtggagtttgtgcgcgagttcgccccccggcggcgcgtgcagtggcgcgggcggaaggtgcaaccggtgctgagacccggcaccaccgtggtcttcacgcccggcgagcgctccggcaccgcttccaagcgctcctacgacgaggtgtacggggatgatgatattctggagcaggcggccgagcgcctgggcgagtttgcttacggcaagcgcagccgttccgcaccgaaggaagaggcggtgtccatcccgctggaccacggcaaccccacgccgagcctcaagcccgtgaccttgcagcaggtgctgccgaccgcggcgccgcgccgggggttcaagcgcgagggcgaggatctgtaccccaccatgcagctgatggtgcccaagcgccagaagctggaagacgtgctggagaccatgaaggtggacccggacgtgcagcccgaggtcaaggtgcggcccatcaagcaggtggccccgggcctgggcgtgcagaccgtggacatcaagattcccacggagcccatggaaacgcagaccgagcccatgatcaagcccagcaccagcaccatggaggtgcagacggatccctggatgccatcggctcctagtcgaagaccccggcgcaagtacggcgcggccagcctgctgatgcccaactacgcgctgcatccttccatcatccccacgccgggctaccgcggcacgcgcttctaccgcggtcataccagcagccgccgccgcaagaccaccactcgccgccgccgtcgccgcaccgccgctgcaaccacccctgccgccctggtgcggagagtgtaccgccgcggccgcgcacctctgaccctgccgcgcgcgcgctaccacccgagcatcgccatttaaactttcgcctgctttgcagatcaatggccctcacatgccgccttcgcgttcccattacgggctaccgaggaagaaaaccgcgccgtagaaggctggcggggaacgggatgcgtcgccaccaccaccggcggcggcgcgccatcagcaagcggttggggggaggcttcctgcccgcgctgatccccatcatcgccgcggcgatcggggcgatccccggcattgcttccgtggcggtgcaggcctctcagcgccactgagacacacttggaaacatcttgtaataaaccaatggactctgacgctcctggtcctgtgatgtgttttcgtagacagatggaagacatcaatttttcgtccctggctccgcgacacggcacgcggccgttcatgggcacctggagcgacatcggcaccagccaactgaacgggggcgccttcaattggagcagtctctggagcgggcttaagaatttcgggtccacgcttaaaacctatggcagcaaggcgtggaacagcaccacagggcaggcgctgagggataagctgaaagagcagaacttccagcagaaggtggtcgatgggctcgcctcgggcatcaacggggtggtggacctggccaaccaggccgtgcagcggcagatcaacagccgcctggacccggtgccgcccgccggctccgtggagatgccgcaggtggaggaggagctgcctcccctggacaagcggggcgagaagcgaccccgccccgatgcggaggagacgctgctgacgcacacggacgagccgcccccgtacgaggaggcggtgaaactgggtctgcccaccacgcggcccatcgcgcccctggccaccggggtgctgaaacccgaaaagcccgcgaccctggacttgcctcctccccagccttcccgcccctctacagtggctaagcccctgccgccggtggccgtggcccgcgcgcgacccgggggcaccgcccgccctcatgcgaactggcagagcactctgaacagcatcgtgggtctgggagtgcagagtgtgaagcgccgccgctgctattaaacctaccgtagcgcttaacttgcttgtctgtgtgtgtatgtattatgtcgccgccgccgctgtccaccagaaggaggagtgaagaggcgcgtcgccgagttgcaagatggccaccccatcgatgctgccccagtgggcgtacatgcacatcgccggacaggacgcttcggagtacctgagtccgggtctggtgcagtttgcccgcgccacagacacctacttcagtctggggaacaagtttaggaaccccacggtggcgcccacgcacgatgtgaccaccgaccgcagccagcggctgacgctgcgcttcgtgcccgtggaccgcgaggacaacacctactcgtacaaagtgcgctacacgctggccgtgggcgacaaccgcgtgctggacatggccagcacctactttgacatccgcggcgtgctggatcggggccctagcttcaaaccctactccggcaccgcctacaacagtctggcccccaagggagcacccaacacttgtcagtggacatataaagccgatggtgaaactgccacagaaaaaacctatacatatggaaatgcacccgtgcagggcattaacatcacaaaagatggtattcaacttggaactgacaccgatgatcagccaatctacgcagataaaacctatcagcctgaacctcaagtgggtgatgctgaatggcatgacatcactggtactgatgaaaagtatggaggcagagctcttaagcctgataccaaaatgaagccttgttatggttcttttgccaagcctactaataaagaaggaggtcaggcaaatgtgaaaacaggaacaggcactactaaagaatatgacatagacatggctttctttgacaacagaagtgcggctgctgctggcctagctccagaaattgttttgtatactgaaaatgtggatttggaaactccagatacccatattgtatacaaagcaggcacagatgacagcagctcttctattaatttgggtcagcaagccatgcccaacagacctaactacattggtttcagagacaactttatcgggctcatgtactacaacagcactggcaatatgggggtgctggccggtcaggcttctcagctgaatgctgtggttgacttgcaagacagaaacaccgagctgtcctaccagctcttgcttgactctctgggtgacagaacccggtatttcagtatgtggaatcaggcggtggacagctatgatcctgatgtgcgcattattgaaaatcatggtgtggaggatgaacttcccaactattgtttccctctggatgctgttggcagaacagatacttatcagggaattaaggctaatggaactgatcaaaccacatggaccaaagatgacagtgtcaatgatgctaatgagataggcaagggtaatccattcgccatggaaatcaacatccaagccaacctgtggaggaacttcctctacgccaacgtggccctgtacctgcccgactcttacaagtacacgccggccaatgttaccctgcccaccaacaccaacacctacgattacatgaacggccgggtggtggcgccctcgctggtggactcctacatcaacatcggggcgcgctggtcgctggatcccatggacaacgtgaaccccttcaaccaccaccgcaatgcggggctgcgctaccgctccatgctcctgggcaacgggcgctacgtgcccttccacatccaggtgccccagaaatttttcgccatcaagagcctcctgctcctgcccgggtcctacacctacgagtggaacttccgcaaggacgtcaacatgatcctgcagagctccctcggcaacgacctgcgcacggacggggcctccatctccttcaccagcatcaacctctacgccaccttcttccccatggcgcacaacacggcctccacgctcgaggccatgctgcgcaacgacaccaacgaccagtccttcaacgactacctctcggcggccaacatgctctaccccatcccggccaacgccaccaacgtgcccatctccatcccctcgcgcaactgggccgccttccgcggctggtccttcacgcgtctcaagaccaaggagacgccctcgctgggctccgggttcgacccctacttcgtctactcgggctccatcccctacctcgacggcaccttctacctcaaccacaccttcaagaaggtctccatcaccttcgactcctccgtcagctggcccggcaacgaccggctcctgacgcccaacgagttcgaaatcaagcgcaccgtcgacggcgagggctacaacgtggcccagtgcaacatgaccaaggactggttcctggtccagatgctggcccactacaacatcggctaccagggcttctacgtgcccgagggctacaaggaccgcatgtactccttcttccgcaacttccagcccatgagccgccaggtggtggacgaggtcaactacaaggactaccaggccgtcaccctggcctaccagcacaacaactcgggcttcgtcggctacctcgcgcccaccatgcgccagggccagccctaccccgccaactacccctacccgctcatcggcaagagcgccgtcaccagcgtcacccagaaaaagttcctctgcgacagggtcatgtggcgcatccccttctccagcaacttcatgtccatgggcgcgctcaccgacctcggccagaacatgctctatgccaactccgcccacgcgctagacatgaatttcgaagtcgaccccatggatgagtccacccttctctatgttgtcttcgaagtcttcgacgtcgtccgagtgcaccagccccaccgcggcgtcatcgaggccgtctacctgcgcacccccttctcggccggtaacgccaccacctaagctcttgcttcttgcaagccatggccgcgggctccggcgagcaggagctcagggccatcatccgcgacctgggctgcgggccctacttcctgggcaccttcgataagcgcttcccgggattcatggccccgcacaagctggcctgcgccatcgtcaacacggccggccgcgagaccgggggcgagcactggctggccttcgcctggaacccgcgctcgaacacctgctacctcttcgaccccttcgggttctcggacgagcgcctcaagcagatctaccagttcgagtacgagggcctgctgcgccgcagcgccctggccaccgaggaccgctgcgtcaccctggaaaagtccacccagaccgtgcagggtccgcgctcggccgcctgcgggctcttctgctgcatgttcctgcacgccttcgtgcactggcccgaccgccccatggacaagaaccccaccatgaacttgctgacgggggtgcccaacggcatgctccagtcgccccaggtggaacccaccctgcgccgcaaccaggaggcgctctaccgcttcctcaactcccactccgcctactttcgctcccaccgcgcgcgcatcgagaaggccaccgccttcgaccgcatgaatcaagacatgtaaaccgtgtgtgtatgttaaatgtctttaataaacagcactttcatgttacacatgcatctgagatgatttatttagaaatcgaaagggttctgccgggtctcggcatggcccgcgggcagggacacgttgcggaactggtacttggccagccacttgaactcggggatcagcagtttgggcagcggggtgtcggggaaggagtcggtccacagcttccgcgtcagttgcagggcgcccagcaggtcgggcgcggagatcttgaaatcgcagttgggacccgcgttctgcgcgcgggagttgcggtacacggggttgcagcactggaacaccatcagggccgggtgcttcacgctcgccagcaccgtcgcgtcggtgatgctctccacgtcgaggtcctcggcgttggccatcccgaagggggtcatcttgcaggtctgccttcccatggtgggcacgcacccgggcttgtggttgcaatcgcagtgcagggggatcagcatcatctgggcctggtcggcgttcatccccgggtacatggccttcatgaaagcctccaattgcctgaacgcctgctgggccttggctccctcggtgaagaagaccccgcaggacttgctagagaactggttggtggcgcacccggcgtcgtgcacgcagcagcgcgcgtcgttgttggccagctgcaccacgctgcgcccccagcggttctgggtgatcttggcccggtcggggttctccttcagcgcgcgctgcccgttctcgctcgccacatccatctcgatcatgtgctccttctggatcatggtggtcccgtgcaggcaccgcagcttgccctcggcctcggtgcacccgtgcagccacagcgcgcacccggtgcactcccagttcttgtgggcgatctgggaatgcgcgtgcacgaagccctgcaggaagcggcccatcatggtggtcagggtcttgttgctagtgaaggtcagcggaatgccgcggtgctcctcgttgatgtacaggtggcagatgcggcggtacacctcgccctgctcgggcatcagctggaagttggctttcaggtcggtctccacgcggtagcggtccatcagcatagtcatgatttccatacccttctcccaggccgagacgatgggcaggctcatagggttcttcaccatcatcttagcgctagcagccgcggccagggggtcgctctcgtccagggtctcaaagctccgcttgccgtccttctcggtgatccgcaccggggggtagctgaagcccacggccgccagctcctcctcggcctgtctttcgtcctcgctgtcctggctgacgtcctgcaggaccacatgcttggtcttgcggggtttcttcttgggcggcagcggcggcggagatgttggagatggcgagggggagcgcgagttctcgctcaccactactatctcttcctcttcttggtccgaggccacgcggcggtaggtatgtctcttcgggggcagaggcggaggcgacgggctctcgccgccgcgacttggcggatggctggcagagccccttccgcgttcgggggtgcgctcccggcggcgctctgactgacttcctccgcggccggccattgtgttctcctagggaggaacaacaagcatggagactcagccatcgccaacctcgccatctgcccccaccgccgacgagaagcagcagcagcagaatgaaagcttaaccgccccgccgcccagccccgccacctccgacgcggccgtcccagacatgcaagagatggaggaatccatcgagattgacctgggctatgtgacgcccgcggagcacgaggaggagctggcagtgcgcttttcacaagaagagatacaccaagaacagccagagcaggaagcagagaatgagcagagtcaggctgggctcgagcatgacggcgactacctccacctgagcgggggggaggacgcgctcatcaagcatctggcccggcaggccaccatcgtcaaggatgcgctgctcgaccgcaccgaggtgcccctcagcgtggaggagctcagccgcgcctacgagttgaacctcttctcgccgcgcgtgccccccaagcgccagcccaatggcacctgcgagcccaacccgcgcctcaacttctacccggtcttcgcggtgcccgaggccctggccacctaccacatctttttcaagaaccaaaagatccccgtctcctgccgcgccaaccgcacccgcgccgacgcccttttcaacctgggtcccggcgcccgcctacctgatatcgcctccttggaagaggttcccaagatcttcgagggtctgggcagcgacgagactcgggccgcgaacgctctgcaaggagaaggaggagagcatgagcaccacagcgccctggtcgagttggaaggcgacaacgcgcggctggcggtgctcaaacgcacggtcgagctgacccatttcgcctacccggctctgaacctgccccccaaagtcatgagcgcggtcatggaccaggtgctcatcaagcgcgcgtcgcccatctccgaggacgagggcatgcaagactccgaggagggcaagcccgtggtcagcgacgagcagctggcccggtggctgggtcctaatgctagtccccagagtttggaagagcggcgcaaactcatgatggccgtggtcctggtgaccgtggagctggagtgcctgcgccgcttcttcgccgacgcggagaccctgcgcaaggtcgaggagaacctgcactacctcttcaggcacgggttcgtgcgccaggcctgcaagatctccaacgtggagctgaccaacctggtctcctacatgggcatcttgcacgagaaccgcctggggcagaacgtgctgcacaccaccctgcgcggggaggcccggcgcgactacatccgcgactgcgtctacctctacctctgccacacctggcagacgggcatgggcgtgtggcagcagtgtctggaggagcagaacctgaaagagctctgcaagctcctgcagaagaacctcaagggtctgtggaccgggttcgacgagcgcaccaccgcctcggacctggccgacctcattttccccgagcgcctcaggctgacgctgcgcaacggcctgcccgactttatgagccaaagcatgttgcaaaactttcgctctttcatcctcgaacgctccggaatcctgcccgccacctgctccgcgctgccctcggacttcgtgccgctgaccttccgcgagtgccccccgccgctgtggagccactgctacctgctgcgcctggccaactacctggcctaccactcggacgtgatcgaggacgtcagcggcgagggcctgctcgagtgccactgccgctgcaacctctgcacgccgcaccgctccctggcctgcaacccccagctgctgagcgagacccagatcatcggcaccttcgagttgcaagggcccagcgaaggcgagggttcagccgccaaggggggtctgaaactcaccccggggctgtggacctcggcctacttgcgcaagttcgtgcccgaggactaccatcccttcgagatcaggttctacgaggaccaatcccatccgcccaaggccgagctgtcggcctgcgtcatcacccagggggcgatcctggcccaattgcaagccatccagaaatcccgccaagaattcttgctgaaaaagggccgcggggtctacctcgacccccagaccggtgaggagctcaaccccggcttcccccaggatgccccgaggaaacaagaagctgaaagtggagctgccgcccgtggaggatttggaggaagactgggagaacagcagtcaggcagaggaggaggagatggaggaagactgggacagcactcaggcagaggaggacagcctgcaagacagtctggaggaagacgaggaggaggcagaggaggaggtggaagaagcagccgccgccagaccgtcgtcctcggcgggggagaaagcaagcagcacggataccatctccgctccgggtcggggtcccgctcgaccacacagtagatgggacgagaccggacgattcccgaaccccaccacccagaccggtaagaaggagcggcagggatacaagtcctggcgggggcacaaaaacgccatcgtctcctgcttgcaggcctgcgggggcaacatctccttcacccggcgctacctgctcttccaccgcggggtgaactttccccgcaacatcttgcattactaccgtcacctccacagcccctactacttccaagaagaggcagcagcagcagaaaaagaccagcagaaaaccagcagctagaaaatccacagcggcggcagcaggtggactgaggatcgcggcgaacgagccggcgcaaacccgggagctgaggaaccggatctttcccaccctctatgccatcttccagcagagtcgggggcaggagcaggaactgaaagtcaagaaccgttctctgcgctcgctcacccgcagttgtctgtatcacaagagcgaagaccaacttcagcgcactctcgaggacgccgaggctctcttcaacaagtactgcgcgctcactcttaaagagtagcccgcgcccgcccagtcgcagaaaaaggcgggaattacgtcacctgtgcccttcgccctagccgcctccacccatcatcatgagcaaagagattcccacgccttacatgtggagctaccagccccagatgggcctggccgccggtgccgcccaggactactccacccgcatgaattggctcagcgccgggcccgcgatgatctcacgggtgaatgacatccgcgcccaccgaaaccagatactcctagaacagtcagcgctcaccgccacgccccgcaatcacctcaatccgcgtaattggcccgccgccctggtgtaccaggaaattccccagcccacgaccgtactacttccgcgagacgcccaggccgaagtccagctgactaactcaggtgtccagctggcgggcggcgccaccctgtgtcgtcaccgccccgctcagggtataaagcggctggtgatccggggcagaggcacacagctcaacgacgaggtggtgagctcttcgctgggtctgcgacctgacggagtcttccaactcgccggatcggggagatcttccttcacgcctcgtcaggccgtcctgactttggagagttcgtcctcgcagccccgctcgggtggcatcggcactctccagttcgtggaggagttcactccctcggtctacttcaaccccttctccggctcccccggccactacccggacgagttcatcccgaacttcgacgccatcagcgagtcggtggacggctacgattgaaactaatcacccccttatccagtgaaataaagatcatattgatgatgattttacagaaataaaaaataatcatttgatttgaaataaagatacaatcatattgatgatttgagtttaacaaaaaaataaagaatcacttacttgaaatctgataccaggtctctgtccatgttttctgccaacaccacttcactcccctcttcccagctctggtactgcaggccccggcgggctgcaaacttcctccacacgctgaaggggatgtcaaattcctcctgtccctcaatcttcattttatcttctatcagatgtccaaaaagcgcgtccgggtggatgatgacttcgaccccgtctacccctacgatgcagacaacgcaccgaccgtgcccttcatcaacccccccttcgtctcttcagatggattccaagagaagcccctgggggtgttgtccctgcgactggccgaccccgtcaccaccaagaacggggaaatcaccctcaagctgggagagggggtggacctcgattcctcgggaaaactcatctccaacacggccaccaaggccgccgcccctctcagtttttccaacaacaccatttcccttaacatggatcaccccttttacactaaagatggaaaattatccttacaagtttctccaccattaaatatactgagaacaagcattctaaacacactagctttaggttttggatcaggtttaggactccgtggctctgccttggcagtacagttagtctctccacttacatttgatactgatggaaacataaagcttaccttagacagaggtttgcatgttacaacaggagatgcaattgaaagcaacataagctgggctaaaggtttaaaatttgaagatggagccatagcaaccaacattggaaatgggttagagtttggaagcagtagtacagaaacaggtgttgatgatgcttacccaatccaagttaaacttggatctggccttagctttgacagtacaggagccataatggctggtaacaaagaagacgataaactcactttgtggacaacacctgatccatcaccaaactgtcaaatactcgcagaaaatgatgcaaaactaacactttgcttgactaaatgtggtagtcaaatactggccactgtgtcagtcttagttgtaggaagtggaaacctaaaccccattactggcaccgtaagcagtgctcaggtgtttctacgttttgatgcaaacggtgttcttttaacagaacattctacactaaaaaaatactgggggtataggcagggagatagcatagatggcactccatataccaatgctgtaggattcatgcccaatttaaaagcttatccaaagtcacaaagttctactactaaaaataatatagtagggcaagtatacatgaatggagatgtttcaaaacctatgcttctcactataaccctcaatggtactgatgacagcaacagtacatattcaatgtcattttcatacacctggactaatggaagctatgttggagcaacatttggggctaactcttataccttctcatacatcgcccaagaatgaacactgtatcccaccctgcatgccaacccttcccaccccactctgtggaacaaactctgaaacacaaaataaaataaagttcaagtgttttattgattcaacagttttacaggattcgagcagttatttttcctccaccctcccaggacatggaatacaccaccctctccccccgcacagccttgaacatctgaatgccattggtgatggacatgcttttggtctccacgttccacacagtttcagagcgagccagtctcgggtcggtcagggagatgaaaccctccgggcactcccgcatctgcacctcacagctcaacagctgaggattgtcctcggtggtcgggatcacggttatctggaagaagcagaagagcggcggtgggaatcatagtccgcgaacgggatcggccggtggtgtcgcatcaggccccgcagcagtcgctgccgccgccgctccgtcaagctgctgctcagggggtccgggtccagggactccctcagcatgatgcccacggccctcagcatcagtcgtctggtgcggcgggcgcagcagcgcatgcggatctcgctcaggtcgctgcagtacgtgcaacacagaaccaccaggttgttcaacagtccatagttcaacacgctccagccgaaactcatcgcgggaaggatgctacccacgtggccgtcgtaccagatcctcaggtaaatcaagtggtgccccctccagaacacgctgcccacgtacatgatctccttgggcatgtggcggttcaccacctcccggtaccacatcaccctctggttgaacatgcagccccggatgatcctgcggaaccacagggccagcaccgccccgcccgccatgcagcgaagagaccccgggtcccggcaatggcaatggaggacccaccgctcgtacccgtggatcatctgggagctgaacaagtctatgttggcacagcacaggcatatgctcatgcatctcttcagcactctcaactcctcgggggtcaaaaccatatcccagggcacggggaactcttgcaggacagcgaaccccgcagaacagggcaatcctcgcacagaacttacattgtgcatggacagggtatcgcaatcaggcagcaccgggtgatcctccaccagagaagcgcgggtctcggtctcctcacagcgtggtaagggggccggccgatacgggtgatggcgggacgcggctgatcgtgttcgcgaccgtgtcatgatgcagttgctttcggacattttcgtacttgctgtagcagaacctggtccgggcgctgcacaccgatcgccggcggcggtctcggcgcttggaacgctcggtgttgaaattgtaaaacagccactctctcagaccgtgcagcagatctagggcctcaggagtgatgaagatcccatcatgcctgatggctctgatcacatcgaccaccgtggaatgggccagacccagccagatgatgcaattttgttgggtttcggtgacggcgggggagggaagaacaggaagaaccatgattaacttttaatccaaacggtctcggagtacttcaaaatgaagatcgcggagatggcacctctcgcccccgctgtgttggtggaaaataacagccaggtcaaaggtgatacggttctcgagatgttccacggtggcttccagcaaagcctccacgcgcacatccagaaacaagacaatagcgaaagcgggagggttctctaattcctcaatcatcatgttacactcctgcaccatccccagataattttcatttttccagccttgaatgattcgaactagttcctgaggtaaatccaagccagccatgataaagagctcgcgcagagcgccctccaccggcattcttaagcacaccctcataattccaagatattctgctcctggttcacctgcagcagattgacaagcggaatatcaaaatctctgccgcgatccctgagctcctccctcagcaataactgtaagtactctttcatatcctctccgaaatttttagccataggaccaccaggaataagattagggcaagccacagtacagataaaccgaagtcctccccagtgagcattgccaaatgcaagactgctataagcatgctggctagacccggtgatatcttccagataactggacagaaaatcgcccaggcaatttttaagaaaatcaacaaaagaaaaatcctccaggtggacgtttagagcctcgggaacaacgatgaagtaaatgcaagcggtgcgttccagcatggttagttagctgatctgtagaaaaaacaaaaatgaacattaaaccatgctagcctggcgaacaggtgggtaaatcgttctctccagcaccaggcaggccacggggtctccggcgcgaccctcgtaaaaattgtcgctatgattgaaaaccatcacagagagacgttcccggtggccggcgtgaatgattcgacaagatgaatacacccccggaacattggcgtccgcgagtgaaaaaaagcgcccgaggaagcaataaggcactacaatgctcagtctcaagtccagcaaagcgatgccatgcggatgaagcacaaaattctcaggtgcgtacaaaatgtaattactcccctcctgcacaggcagcaaagcccccgatccctccaggtacacatacaaagcctcagcgtccatagcttaccgagcagcagcacacaacaggcgcaagagtcagagaaaggctgagctctaacctgtccacccgctctctgctcaatatatagcccagatctacactgacgtaaaggccaaagtctaaaaatacccgccaaataatcacacacgcccagcacacgcccagaaaccggtgacacactcaaaaaaatacgcgcacttcctcaaacgcccaaaactgccgtcatttccgggttcccacgctacgtcatcaaaacacgactttcaaattccgtcgaccgttaaaaacgtcacccgccccgcccctaacggtcgcccgtctctcagccaatcagcgccccgcatccccaaattcaaacacctcatttgcatattaacgcgcacaaaaagtttgaggtatattattgatgatg

SEQ ID NO: 58 - DNA, 656 bp, Artificial Sequence
  Description of Artificial Sequence: Synthetic polynucleotide
gacattgattattgactagttgttaatagtaatcaattacggggtcattagttcatagcccatatatggagttccgcgttacataacttacggtaaatggcccgcctggctgaccgcccaacgacccccgcccattgacgtcaataatgacgtatgttcccatagtaacgccaatagggactttccattgacgtcaatgggtggagtatttacggtaaactgcccacttggcagtacatcaagtgtatcatatgccaagtccgccccctattgacgtcaatgacggtaaatggcccgcctggcattatgcccagtacatgaccttacgggactttcctacttggcagtacatctacgtattagtcatcgctattaccatggtgatgcggttttggcagtacaccaatgggcgtggatagcggtttgactcacggggatttccaagtctccaccccattgacgtcaatgggagtttgttttggcaccaaaatcaacgggactttccaaaatgtcgtaataaccccgccccgttgacgcaaatgggcggtaggcgtgtacggtgggaggtctatataagcagagctcgtttagtgaaccgtcagatcgcctggaacgccatccacgctgttttgacctccatagaagacagcgatcgc

SEQ ID NO: 59 - DNA, 550 bp, Artificial Sequence
  Description of Artificial Sequence: Synthetic polynucleotide
cgttactggccgaagccgcttggaataaggccggtgtgcgtttgtctatatgttattttccaccatattgccgtcttttggcaatgtgagggcccggaaacctggccctgtcttcttgacgagcattcctaggggtctttcccctctcgccaaaggaatgcaaggtctgttgaatgtcgtgaaggaagcagttcctctggaagcttcttgaagacaaacaacgtctgtagcgaccctttgcaggcagcggaaccccccacctggcgacaggtgcctctgcggccaaaagccacgtgtataagatacacctgcaaaggcggcacaaccccagtgccacgttgtgagttggatagttgtggaaagagtcaaatggctctcctcaagcgtattcaacaaggggctgaaggatgcccagaaggtaccccattgtatgggatctgatctggggcctcggtgcacatgctttacatgtgtttagtcgaggttaaaaaacgtctaggccccccgaaccacggggacgtggttttcctttgaaaaacacgatgataat

SEQ ID NO: 60 - DNA, 45 bp, Artificial Sequence
  Description of Artificial Sequence: Synthetic oligonucleotide
atgggctggtccctgatcctgctgttcctggtggctgtggccacc

SEQ ID NO: 61 - DNA, 45 bp, Artificial Sequence
  Description of Artificial Sequence: Synthetic oligonucleotide
atgggatggagctggatctttctcttcctcctgtcaggaactgca

SEQ ID NO: 62 - DNA, 366 bp, Artificial Sequence
  Description of Artificial Sequence: Synthetic polynucleotide
ggagtgcattctgaggccaagttacaggagtctggacctgtgctggttaaacctggagcttctgtgaagatgagctgtaaggccagcggctacacctttaccgactactacatgaactgggtgaagcagtctcacggaaagtctctggagtggatcggcgtgatcaacccctacaatggcgatacaagctacaaccagaagttcaagggcaaggccaccctgaccgtggataagagcagctctacagcctatatggagctgaatagcctgacaagcgaggattctgccgtgtactactgcgcccggtattatggcagctggtttgcctattggggacaaggaacactgattaccgtgtctacagcc

SEQ ID NO: 63 - DNA, 1005 bp, Artificial Sequence
  Description of Artificial Sequence: Synthetic polynucleotide
aaaacaacacccccatcagtctatccactggcccctgggtgtggagatacaactggttcctccgtgactctgggatgcctggtcaagggctacttccctgagtcagtgactgtgacttggaactctggatccctgtccagcagtgtgcacaccttcccagctctcctgcagtctggactctacactatgagcagctcagtgactgtcccctccagcacctggccaagtcagaccgtcacctgcagcgttgctcacccagccagcagcaccacggtggacaaaaaacttgagcccagcgggcccatttcaacaatcaacccctgtcctccatgcaaggagtgtcacaaatgcccagctcctaacctggagggtggaccatccgtcttcatcttccctccaaatatcaaggatgtactcatgatctccctgacacccaaggtcacgtgtgtggtggtggatgtgagcgaggatgacccagacgtccagatcagctggtttgtgaacaacgtggaagtacacacagctcagacacaaacccatagagaggattacaacagtactatccgggtggtcagcaccctccccatccagcaccaggactggatgagtggcaaggagttcaaatgcaaggtcaacaacaaagacctcccatcacccatcgagagaaccatctcaaaaattaaagggctagtcagagctccacaagtatacatcttgccgccaccagcagagcagttgtccaggaaagatgtcagtctcacttgcctggtcgtgggcttcaaccctggagacatcagtgtggagtggaccagcaatgggcatacagaggagaactacaaggacaccgcaccagtcctggactctgacggttcttacttcatatatagcaagctcaatatgaaaacaagcaagtgggagaaaacagattccttctcatgcaacgtgagacacgagggtctgaaaaattactacctgaagaagaccatctcccggtctccgggtaaa

SEQ ID NO: 64 - DNA, 12 bp, Artificial Sequence
  Description of Artificial Sequence: Synthetic oligonucleotide
cgcaaacggaga

SEQ ID NO: 65 - DNA, 66 bp, Artificial Sequence
  Description of Artificial Sequence: Synthetic oligonucleotide
ggcgtcagagctgaaggtagaggctctttgctcacctgtggagatgtggaagagaaccctggaccc

SEQ ID NO: 66 - DNA, 55 bp, Artificial Sequence
  Description of Artificial Sequence: Synthetic oligonucleotide
atggacatgagagtgcctgctcaacttctgggactgctgttactgtggcttcctg

SEQ ID NO: 67 - DNA, 46 bp, Artificial Sequence
  Description of Artificial Sequence: Synthetic oligonucleotide
atgaagttgcctgttaggctgttggtgctgatgttctggattcctg

SEQ ID NO: 68 - DNA, 668 bp, Artificial Sequence
  Description of Artificial Sequence: Synthetic polynucleotide
gagctagatgcgatatcgtgatgacccagacaacactgtctctgcctgtgtctctgggagatcaggcctctatcagctgtagatctagccagagcattgtgcactctaacggcaacacctacctggagtggtacctgcagaaaccaggacaaagccctaagctgctgatctacaaagtgagcaaccggtttagcggcgtgcccgacagattttctggatctggctctggcaccgattttacactgaagatcagcagagtggaggccgaggatctgggagtgtactactgctttcagggctctcatgtgccttacacatttggaggaggaaccaagctggagatcaagcgggctgatgctgcaccaactgtatccatcttcccaccatccagtgagcagttaacatctggaggtgcctcagtcgtgtgcttcttgaacaacttctaccccaaagacatcaatgtcaagtggaagattgatggcagtgaacgacaaaatggcgtcctgaacagttggactgatcaggacagcaaagacagcacctacagcatgagcagcaccctcacgttgaccaaggacgagtatgaacgacataacagctatacctgtgaggccactcacaagacatcaacttcacccattgtcaagagcttcaacaggaatgagtgt

SEQ ID NO: 69 - DNA, 224 bp, Artificial Sequence
  Description of Artificial Sequence: Synthetic polynucleotide
agacatgataagatacattgatgagtttggacaaaccacaactagaatgcagtgaaaaaaatgctttatttgtgaaatttgtgatgctattgctttatttgtaaccattataagctgcaataaacaagttaacaacaacaattgcattcattttatgtttcaggttcagggggagatgtgggaggttttttaaagcaagtaaaacctctacaaatgtggtaaaa

SEQ ID NO: 70 - DNA, 3483 bp, Artificial Sequence
  Description of Artificial Sequence: Synthetic polynucleotide
atggtgagcaagggcgaggagctgttcaccggggtggtgcccatcctggtcgagctggacggcgacgtaaacggccacaagttcagcgtgtccggcgagggcgagggcgatgccacctacggcaagctgaccctgaagttcatctgcaccaccggcaagctgcccgtgccctggcccaccctcgtgaccaccctgacctacggcgtgcagtgcttcagccgctaccccgaccacatgaagcagcacgacttcttcaagtccgccatgcccgaaggctacgtccaggagcgcaccatcttcttcaaggacgacggcaactacaagacccgcgccgaggtgaagttcgagggcgacaccctggtgaaccgcatcgagctgaagggcatcgacttcaaggaggacggcaacatcctggggcacaagctggagtacaactacaacagccacaacgtctatatcatggccgacaagcagaagaacggcatcaaggtgaacttcaagatccgccacaacatcgaggacggcagcgtgcagctcgccgaccactaccagcagaacacccccatcggcgacggccccgtgctgctgcccgacaaccactacctgagcacccagtccgccctgagcaaagaccccaacgagaagcgcgatcacatggtcctgctggagttcgtgaccgccgccgggatcactctcggcatggacgagctttacaagtagtgagtttaaactccaagtccctgtaccgttactggccgaagccgcttggaataaggccggtgtgcgtttgtctatatgttattttccaccatattgccgtcttttggcaatgtgagggcccggaaacctggccctgtcttcttgacgagcattcctaggggtctttcccctctcgccaaaggaatgcaaggtctgttgaatgtcgtgaaggaagcagttcctctggaagcttcttgaagacaaacaacgtctgtagcgaccctttgcaggcagcggaaccccccacctggcgacaggtgcctctgcggccaaaagccacgtgtataagatacacctgcaaaggcggcacaaccccagtgccacgttgtgagttggatagttgtggaaagagtcaaatggctctcctcaagcgtattcaacaaggggctgaaggatgcccagaaggtaccccattgtatgggatctgatctggggcctcggtgcacatgctttacatgtgtttagtcgaggttaaaaaacgtctaggccccccgaaccacggggacgtggttttcctttgaaaaacacgatgataatatggagttcggcctctcttgggttttcttggtcgctttgcttagaggggtacaatgtcaagtccaattggttgagtctggtggtggtgtagttcaaccaggacggtcacttcggctctcctgtgccgcatccgggttcactttcagttcttacacaatgcactgggttagacaagcccctggtaagggtttggagtgggtaacgttcatctcctacgacgggaataataagtactacgccgactcagtcaaggggcgattcacgatatcccgagacaattcaaagaatacactctatctccaaatgaattcactccgggctgaggacactgcaatctactactgtgcacggacaggttggttgggacccttcgactactggggtcaaggaacactcgtaacagtctcatccgcctctacaaagggtccatctgtattcccattggcaccttcctctaagagtacatcaggcgggacagctgctcttggttgtttggtcaaggactacttccctgagcctgtaactgtatcttggaattctggtgcactcacttctggagtacacactttccccgccgtcttgcaatcatccgggctctactcactctcttcagtagtaacggtaccatcaagtagtctcggaactcaaacgtacatctgtaatgttaatcacaagccttctaatactaaggtcgacaagagagtcgagcccaagagttgtgacaagacacacacttgtccaccttgtcccgcccctgagttgctcggtggaccatcagtcttcttgtttcccccaaagccaaaggacacactcatgatctcccgtactccagaggttacttgtgtcgtcgtcgacgtctcccacgaggaccctgaggttaagttcaattggtacgtcgacggtgtcgaggtccacaatgcaaagacaaagcctagggaagagcaatacaattccacgtaccgggtagtctccgttctcacagttctccaccaagactggttgaatggaaaggagtacaagtgtaaggtcagtaataaggcccttcccgcccctatcgagaagacaatctccaaggctaaggggcaacctagagagccccaagtatacacattgcccccaagtcgggacgagctcacaaagaatcaagtttccttgacatgtcttgttaaggggttctacccatcagacatcgcagttgagtgggagtccaatgggcaacctgagaataattacaagactacaccacccgtccttgacagtgacggttcattcttcctctacagtaagttgacggttgacaagagtcggtggcaacaaggaaatgtcttctcctgttcagtaatgcacgaggctctccacaatcactacactcaaaagtccttgtccctttctcccggtaagcggaagagacgaggggtcagggccgaggggcggggttctcttctcacatgtggagacgtcgaggagaatcctggtcctatggagactcccgcccaattgttgttcttgctcctcttgtggcttcccgacacaactggggagatcgtcctcacacaatctcccgggacgctttcactctctccaggagagcgggccacgctcagttgtagagcaagtcaaagtgtcgggtcatcatacttggcctggtaccaacaaaagccagggcaagcccccagacttttgatctacggggccttctcccgagccacaggtatacccgaccggttctccggatccggttcaggaacggacttcacactcactatctcaagattggagcccgaggacttcgccgtatactactgtcaacaatacggttccagtccctggacgttcggtcaagggacaaaggttgagataaagcggacagtcgccgctccgtccgtcttcatcttcccaccttccgacgagcaactcaagtctggaacagcttctgtcgtttgtctcctcaataatttctacccccgcgaggcaaaggttcaatggaaggtagacaatgctctccaaagtgggaatagtcaagagtctgttacagagcaagacagtaaggactctacatacagtttgtcatctacacttacactttctaaggccgactacgagaagcacaaggtatacgcctgtgaggtcactcaccaaggattgtcaagtccagtcacgaagtcattcaatcgaggagagtgttaa

SEQ ID NO: 71 - DNA, 34363 bp, Artificial Sequence
  Description of Artificial Sequence: Synthetic polynucleotide
catcatcaataatatacctcaaactttttgtgcgcgttaatatgcaaatgaggcgtttgaatttggggaggaagggcggtgattggtcgagggatgagcgaccgttaggggcggggcgagtgacgttttgatgacgtggttgcgaggaggagccagtttgcaagttctcgtgggaaaagtgacgtcaaacgaggtgtggtttgaacacggaaatactcaattttcccgcgctctctgacaggaaatgaggtgtttctgggcggatgcaagtgaaaacgggccattttcgcgcgaaaactgaatgaggaagtgaaaatctgagtaatttcgcgtttatggcagggaggagtatttgccgagggccgagtagactttgaccgattacgtgggggtttcgattaccgtgtttttcacctaaatttccgcgtacggtgtcaaagtccggtgtttttacgtaggtgtcagctgatcgccagggtatttaaacctgcgctctccagtcaagaggccactcttgagtgccagcgagaagagttttctcctccgcgccgcgagtcagatctacactttgaaagtagggataacagggtaatgacattgattattgactagttgttaatagtaatcaattacggggtcattagttcatagcccatatatggagttccgcgttacataacttacggtaaatggcccgcctggctgaccgcccaacgacccccgcccattgacgtcaataatgacgtatgttcccatagtaacgccaatagggactttccattgacgtcaatgggtggagtatttacggtaaactgcccacttggcagtacatcaagtgtatcatatgccaagtccgccccctattgacgtcaatgacggtaaatggcccgcctggcattatgcccagtacatgaccttacgggactttcctacttggcagtacatctacgtattagtcatcgctattaccatggtgatgcggttttggcagtacaccaatgggcgtggatagcggtttgactcacggggatttccaagtctccaccccattgacgtcaatgggagtttgttttggcaccaaaatcaacgggactttccaaaatgtcgtaataaccccgccccgttgacgcaaatgggcggtaggcgtgtacggtgggaggtctatataagcagagctcgtttagtgaaccgtcagatcgcctggaacgccatccacgctgttttgacctccatagaagacagcgatcgcgccaccatggccgggatgttccaggcactgtccgaaggctgcacaccctatgatattaaccagatgctgaatgtcctgggagaccaccaggtctctggcctggagcagctggagagcatcatcaacttcgagaagctgaccgagtggacaagctccaatgtgatgcctatcctgtccccactgaccaagggcatcctgggcttcgtgtttaccctgacagtgccttctgagcggggcctgtcttgcatcagcgaggcagacgcaaccacaccagagtccgccaatctgggcgaggagatcctgtctcagctgtacctgtggccccgggtgacatatcactccccttcttacgcctatcaccagttcgagcggagagccaagtacaagagacacttcccaggctttggccagtctctgctgttcggctaccccgtgtacgtgttcggcgattgcgtgcagggcgactgggatgccatccggtttagatactgcgcaccacctggatatgcactgctgaggtgtaacgacaccaattattccgccctgctggcagtgggcgccctggagggccctcgcaatcaggattggctgggcgtgccaaggcagctggtgacacgcatgcaggccatccagaacgcaggcctgtgcaccctggtggcaatgctggaggagacaatcttctggctgcaggcctttctgatggccctgaccgacagcggccccaagacaaacatcatcgtggattcccagtacgtgatgggcatctccaagccttctttccaggagtttgtggactgggagaacgtgagcccagagctgaattccaccgatcagccattctggcaggcaggaatcctggcaaggaacctggtgcctatggtggccacagtgcagggccagaatctgaagtaccagggccagagcctggtcatcagcgcctccatcatcgtgtttaacctgctggagctggagggcgactatcgggacgatggcaacgtgtgggtgcacaccccactgagccccagaacactgaacgcctgggtgaaggccgtggaggagaagaagggcatcccagtgcacctggagctggcctccatgaccaatatggagctgatgtctagcatcgtgcaccagcaggtgaggacatacggacccgtgttcatgtgcctgggaggcctgctgaccatggtggcaggagccgtgtggctgacagtgcgggtgctggagctgttcagagccgcccagctggccaacgatgtggtgctgcagatcatggagctgtgcggagcagcctttcgccaggtgtgccacaccacagtgccatggcccaatgcctccctgacccccaagtggaacaatgagacaacacagcctcagatcgccaactgtagcgtgtacgacttcttcgtgtggctgcactactatagcgtgagggataccctgtggccccgcgtgacataccacatgaataagtacgcctatcacatgctggagaggcgcgccaagtataagagaggccctggcccaggcgcaaagtttgtggcagcatggaccctgaaggccgccgccggccccggccccggccagtatatcaaggctaacagtaagttcattggaatcacagagctgggacccggacctggataatgagtttaaactccaagtccctgtaccgttactggccgaagccgcttggaataaggccggtgtgcgtttgtctatatgttattttccaccatattgccgtcttttggcaatgtgagggcccggaaacctggccctgtcttcttgacgagcattcctaggggtctttcccctctcgccaaaggaatgcaaggtctgttgaatgtcgtgaaggaagcagttcctctggaagcttcttgaagacaaacaacgtctgtagcgaccctttgcaggcagcggaaccccccacctggcgacaggtgcctctgcggccaaaagccacgtgtataagatacacctgcaaaggcggcacaaccccagtgccacgttgtgagttggatagttgtggaaagagtcaaatggctctcctcaagcgtattcaacaaggggctgaaggatgcccagaaggtaccccattgtatgggatctgatctggggcctcggtgcacatgctttacatgtgtttagtcgaggttaaaaaacgtctaggccccccgaaccacggggacgtggttttcctttgaaaaacacgatgataatatggagttcggcctctcttgggttttcttggtcgctttgcttagaggggtacaatgtcaagtccaattggttgagtctggtggtggtgtagttcaaccaggacggtcacttcggctctcctgtgccgcatccgggttcactttcagttcttacacaatgcactgggttagacaagcccctggtaagggtttggagtgggtaacgttcatctcctacgacgggaataataagtactacgccgactcagtcaaggggcgattcacgatatcccgagacaattcaaagaatacactctatctccaaatgaattcactccgggctgaggacactgcaatctactactgtgcacggacaggttggttgggacccttcgactactggggtcaaggaacactcgtaacagtctcatccgcctctacaaagggtccatctgtattcccattggcaccttcctctaagagtacatcaggcgggacagctgctcttggttgtttggtcaaggactacttccctgagcctgtaactgtatcttggaattctggtgcactcacttctggagtacacactttccccgccgtcttgcaatcatccgggctctactcactctcttcagtagtaacggtaccatcaagtagtctcggaactcaaacgtacatctgtaatgttaatcacaagccttctaatactaaggtcgacaagagagtcgagcccaagagttgtgacaagacacacacttgtccaccttgtcccgcccctgagttgctcggtggaccatcagtcttcttgtttcccccaaagccaaaggacacactcatgatctcccgtactccagaggttacttgtgtcgtcgtcgacgtctcccacgaggaccctgaggttaagttcaattggtacgtcgacggtgtcgaggtccacaatgcaaagacaaagcctagggaagagcaatacaattccacgtaccgggtagtctccgttctcacagttctccaccaagactggttgaatggaaaggagtacaagtgtaaggtcagtaataaggcccttcccgcccctatcgagaagacaatctccaaggctaaggggcaacctagagagccccaagtatacacattgcccccaagtcgggacgagctcacaaagaatcaagtttccttgacatgtcttgttaaggggttctacccatcagacatcgcagttgagtgggagtccaatgggcaacctgagaataattacaagactacaccacccgtccttgacagtgacggttcattcttcctctacagtaagttgacggttgacaagagtcggtggcaacaaggaaatgtcttctcctgttcagtaatgcacgaggctctccacaatcactacactcaaaagtccttgtccctttctcccggtaagcggaagagacgaggggtcagggccgaggggcggggttctcttctcacatgtggagacgtcgaggagaatcctggtcctatggagactcccgcccaattgttgttcttgctcctcttgtggcttcccgacacaactggggagatcgtcctcacacaatctcccgggacgctttcactctctccaggagagcgggccacgctcagttgtagagcaagtcaaagtgtcgggtcatcatacttggcctggtaccaacaaaagccagggcaagcccccagacttttgatctacggggccttctcccgagccacaggtatacccgaccggttctccggatccggttcaggaacggacttcacactcactatctcaagattggagcccgaggacttcgccgtatactactgtcaacaatacggttccagtccctggacgttcggtcaagggacaaaggttgagataaagcggacagtcgccgctccgtccgtcttcatcttcccaccttccgacgagcaactcaagtctggaacagcttctgtcgtttgtctcctcaataatttctacccccgcgaggcaaaggttcaatggaaggtagacaatgctctccaaagtgggaatagtcaagagtctgttacagagcaagacagtaaggactctacatacagtttgtcatctacacttacactttctaaggccgactacgagaagcacaaggtatacgcctgtgaggtcactcaccaaggattgtcaagtccagtcacgaagtcattcaatcgaggagagtgttaatgaatttaaatgtgagggttaatgcttcgagcagacatgataagatacattgatgagtttggacaaaccacaactagaatgcagtgaaaaaaatgctttatttgtgaaatttgtgatgctattgctttatttgtaaccattataagctgcaataaacaagttaacaacaacaattgcattcattttatgtttcaggttcagggggagatgtgggaggttttttaaagcaagtaaaacctctacaaatgtggtaaaataactataacggtcctaaggtagcgagtgagtagtgttctggggcgggggaggacctgcatgagggccagaataactgaaatctgtgcttttctgtgtgttgcagcagcatgagcggaagcggctcctttgagggaggggtattcagcccttatctgacggggcgtctcccctcctgggcgggagtgcgtcagaatgtgatgggatccacggtggacggccggcccgtgcagcccgcgaactcttcaaccctgacctatgcaaccctgagctcttcgtcgttggacgcagctgccgccgcagctgctgcatctgccgccagcgccgtgcgcggaatggccatgggcgccggctactacggcactctggtggccaactcgagttccaccaataatcccgccagcctgaacgaggagaagctgttgctgctgatggcccagctcgaggccttgacccagcgcctgggcgagctgacccagcaggtggctcagctgcaggagcagacgcgggccgcggttgccacggtgaaatccaaataaaaaatgaatcaataaataaacggagacggttgttgattttaacacagagtctgaatctttatttgatttttcgcgcgcggtaggccctggaccaccggtctcgatcattgagcacccggtggatcttttccaggacccggtagaggtgggcttggatgttgaggtacatgggcatgagcccgtcccgggggtggaggtagctccattgcagggcctcgtgctcgggggtggtgttgtaaatcacccagtcatagcaggggcgcagggcatggtgttgcacaatatctttgaggaggagactgatggccacgggcagccctttggtgtaggtgtttacaaatctgttgagctgggagggatgcatgcggggggagatgaggtgcatcttggcctggatcttgagattggcgatgttaccgcccagatcccgcctggggttcatgttgtgcaggaccaccagcacggtgtatccggtgcacttggggaatttatcatgcaacttggaagggaaggcgtgaaagaatttggcgacgcctttgtgcccgcccaggttttccatgcactcatccatgatgatggcgatgggcccgtgggcggcggcctgggcaaagacgtttcgggggtcggacacatcatagttgtggtcctgggtgaggtcatcataggccattttaatgaatttggggcggagggtgccggactgggggacaaaggttccctcgatcccgggggcgtagttcccctcacagatctgcatctcccaggctttgagctcggagggggggatcatgtccacctgcggggcgataaagaacacggtttccggggcgggggagatgagctgggccgaaagcaagttccggagcagctgggacttgccgcagccggtggggccgtagatgaccccgatgaccggctgcaggtggtagttgagggagagacagctgccgtcctcccggaggaggggggccacctcgttcatcatctcgcgcacgtgcatgttctcgcgcaccagttccgccaggaggcgctctccccccagggataggagctcctggagcgaggcgaagtttttcagcggcttgagtccgtcggccatgggcattttggagagggtttgttgcaagagttccaggcggtcccagagctcggtgatgtgctctacggcatctcgatccagcagacctcctcgtttcgcgggttgggacggctgcgggagtagggcaccagacgatgggcgtccagcgcagccagggtccggtccttccagggtcgcagcgtccgcgtcagggtggtctccgtcacggtgaaggggtgcgcgccgggctgggcgcttgcgagggtgcgcttcaggctcatccggctggtcgaaaaccgctcccgatcggcgccctgcgcgtcggccaggtagcaattgaccatgagttcgtagttgagcgcctcggccgcgtggcctttggcgcggagcttacctttggaagtctgcccgcaggcgggacagaggagggacttgagggcgtagagcttgggggcgaggaagacggactcgggggcgtaggcgtccgcgccgcagtgggcgcagacggtctcgcactccacgagccaggtgaggtcgggctggtcggggtcaaaaaccagtttcccgccgttctttttgatgcgtttcttacctttggtctccatgagctcgtgtccccgctgggtgacaaagaggctgtccgtgtccccgtagaccgactttatgggccggtcctcgagcggtgtgccgcggtcctcctcgtagaggaaccccgcccactccgagacgaaagcccgggtccaggccagcacgaaggaggccacgtgggacgggtagcggtcgttgtccaccagcgggtccaccttttccagggtatgcaaacacatgtccccctcgtccacatccaggaaggtgattggcttgtaagtgtaggccacgtgaccgggggtcccggccgggggggtataaaagggtgcgggtccctgctcgtcctcactgtcttccggatcgctgtccaggagcgccagctgttggggtaggtattccctctcgaaggcgggcatgacctcggcactcaggttgtcagtttctagaaacgaggaggatttgatattgacggtgccggcggagatgcctttcaagagcccctcgtccatctggtcagaaaagacgatctttttgttgtcgagcttggtggcgaaggagccgtagagggcgttggagaggagcttggcgatggagcgcatggtctggtttttttccttgtcggcgcgctccttggcggcgatgttgagctgcacgtactcgcgcgccacgcacttccattcggggaagacggtggtcagctcgtcgggcacgattctgacctgccagccccgattatgcagggtgatgaggtccacactggtggccacctcgccgcgcaggggctcattagtccagcagaggcgtccgcccttgcgcgagcagaaggggggcagggggtccagcatgacctcgtcgggggggtcggcatcgatggtgaagatgccgggcaggaggtcggggtcaaagtagctgatggaagtggccagatcgtccagggcagcttgccattcgcgcacggccagcgcgcgctcgtagggactgaggggcgtgccccagggcatgggatgggtaagcgcggaggcgtacatgccgcagatgtcgtagacgtagaggggctcctcgaggatgccgatgtaggtggggtagcagcgccccccgcggatgctggcgcgcacgtagtcatacagctcgtgcgagggggcgaggagccccgggcccaggttggtgcgactgggcttttcggcgcggtagacgatctggcggaaaatggcatgcgagttggaggagatggtgggcctttggaagatgttgaagtgggcgtggggcagtccgaccgagtcgcggatgaagtgggcgtaggagtcttgcagcttggcgacgagctcggcggtgactaggacgtccagagcgcagtagtcgagggtctcctggatgatgtcatacttgagctgtcccttttgtttccacagctcgcggttgagaaggaactcttcgcggtccttccagtactcttcgagggggaacccgtcctgatctgcacggtaagagcctagcatgtagaactggttgacggccttgtaggcgcagcagcccttctccacggggagggcgtaggcctgggcggccttgcgcagggaggtgtgcgtgagggcgaaagtgtccctgaccatgaccttgaggaactggtgcttgaagtcgatatcgtcgcagcccccctgctcccagagctggaagtccgtgcgcttcttgtaggcggggttgggcaaagcgaaagtaacatcgttgaagaggatcttgcccgcgcggggcataaagttgcgagtgatgcggaaaggttggggcacctcggcccggttgttgatgacctgggcggcgagcacgatctcgtcgaagccgttgatgttgtggcccacgatgtagagttccacgaatcgcggacggcccttgacgtggggcagtttcttgagctcctcgtaggtgagctcgtcggggtcgctgagcccgtgctgctcgagcgcccagtcggcgagatgggggttggcgcggaggaaggaagtccagagatccacggccagggcggtttgcagacggtcccggtactgacggaactgctgcccgacggccattttttcgggggtgacgcagtagaaggtgcgggggtccccgtgccagcgatcccatttgagctggagggcgagatcgagggcgagctcgacgagccggtcgtccccggagagtttcatgaccagcatgaaggggacgagctgcttgccgaaggaccccatccaggtgtaggtttccacatcgtaggtgaggaagagcctttcggtgcgaggatgcgagccgatggggaagaactggatctcctgccaccaattggaggaatggctgttgatgtgatggaagtagaaatgccgacggcgcgccgaacactcgtgcttgtgtttatacaagcggccacagtgctcgcaacgctgcacgggatgcacgtgctgcacgagctgtacctgagttcctttgacgaggaatttcagtgggaagtggagtcgtggcgcctgcatctcgtgctgtactacgtcgtggtggtcggcctggccctcttctgcctcgatggtggtcatgctgacgagcccgcgcgggaggcaggtccagacctcggcgcgagcgggtcggagagcgaggacgagggcgcgcaggccggagctgtccagggtcctgagacgctgcggagtcaggtcagtgggcagcggcggcgcgcggttgacttgcaggagtttttccagggcgcgcgggaggtccagatggtacttgatctccaccgcgccattggtggcgacgtcgatggcttgcagggtcccgtgcccctggggtgtgaccaccgtcccccgtttcttcttgggcggctggggcgacgggggcggtgcctcttccatggttagaagcggcggcgaggacgcgcgccgggcggcaggggcggctcggggcccggaggcaggggcggcaggggcacgtcggcgccgcgcgcgggtaggttctggtactgcgcccggagaagactggcgtgagcgacgacgcgacggttgacgtcctggatctgacgcctctgggtgaaggccacgggacccgtgagtttgaacctgaaagagagttcgacagaatcaatctcggtatcgttgacggcggcctgccgcaggatctcttgcacgtcgcccgagttgtcctggtaggcgatctcggtcatgaactgctcgatctcctcctcttgaaggtctccgcggccggcgcgctccacggtggccgcgaggtcgttggagatgcggcccatgagctgcgagaaggcgttcatgcccgcctcgttccagacgcggctgtagaccacgacgccctcgggatcgcgggcgcgcatgaccacctgggcgaggttgagctccacgtggcgcgtgaagaccgcgtagttgcagaggcgctggtagaggtagttgagcgtggtggcgatgtgctcggtgacgaagaaatacatgatccagcggcggagcggcatctcgctgacgtcgcccagcgcctccaaacgttccatggcctcgtaaaagtccacggcgaagttgaaaaactgggagttgcgcgccgagacggtcaactcctcctccagaagacggatgagctcggcgatggtggcgcgcacctcgcgctcgaaggcccccgggagttcctccacttcctcttcttcctcctccactaacatctcttctacttcctcctcaggcggcagtggtggcgggggagggggcctgcgtcgccggcggcgcacgggcagacggtcgatgaagcgctcgatggtctcgccgcgccggcgtcgcatggtctcggtgacggcgcgcccgtcctcgcggggccgcagcgtgaagacgccgccgcgcatctccaggtggccgggggggtccccgttgggcagggagagggcgctgacgatgcatcttatcaattgccccgtagggactccgcgcaaggacctgagcgtctcgagatccacgggatctgaaaaccgctgaacgaaggcttcgagccagtcgcagtcgcaaggtaggctgagcacggtttcttctggcgggtcatgttggttgggagcggggcgggcgatgctgctggtgatgaagttgaaataggcggttctgagacggcggatggtggcgaggagcaccaggtctttgggcccggcttgctggatgcgcagacggtcggccatgccccaggcgtggtcctgacacctggccaggtccttgtagtagtcctgcatgagccgctccacgggcacctcctcctcgcccgcgcggccgtgcatgcgcgtgagcccgaagccgcgctggggctggacgagcgccaggtcggcgacgacgcgctcggcgaggatggcttgctggatctgggtgagggtggtctggaagtcatcaaagtcgacgaagcggtggtaggctccggtgttgatggtgtaggagcagttggccatgacggaccagttgacggtctggtggcccggacgcacgagctcgtggtacttgaggcgcgagtaggcgcgcgtgtcgaagatgtagtcgttgcaggtgcgcaccaggtactggtagccgatgaggaagtgcggcggcggctggcggtagagcggccatcgctcggtggcgggggcgccgggcgcgaggtcctcgagcatggtgcggtggtagccgtagatgtacctggacatccaggtgatgccggcggcggtggtggaggcgcgcgggaactcgcggacgcggttccagatgttgcgcagcggcaggaagtagttcatggtgggcacggtctggcccgtgaggcgcgcgcagtcgtggatgctctatacgggcaaaaacgaaagcggtcagcggctcgactccgtggcctggaggctaagcgaacgggttgggctgcgcgtgtaccccggttcgaatctcgaatcaggctggagccgcagctaacgtggtattggcactcccgtctcgacccaagcctgcaccaaccctccaggatacggaggcgggtcgttttgcaacttttttttggaggccggatgagactagtaagcgcggaaagcggccgaccgcgatggctcgctgccgtagtctggagaagaatcgccagggttgcgttgcggtgtgccccggttcgaggccggccggattccgcggctaacgagggcgtggctgccccgtcgtttccaagaccccatagccagccgacttctccagttacggagcgagcccctcttttgttttgtttgtttttgccagatgcatcccgtactgcggcagatgcgcccccaccaccctccaccgcaacaacagccccctccacagccggcgcttctgcccccgccccagcagcaacttccagccacgaccgccgcggccgccgtgagcggggctggacagagttatgatcaccagctggccttggaagagggcgaggggctggcgcgcctgggggcgtcgtcgccggagcggcacccgcgcgtgcagatgaaaagggacgctcgcgaggcctacgtgcccaagcagaacctgttcagagacaggagcggcgaggagcccgaggagatgcgcgcggcccggttccacgcggggcgggagctgcggcgcggcctggaccgaaagagggtgctgagggacgaggatttcgaggcggacgagctgacggggatcagccccgcgcgcgcgcacgtggccgcggccaacctggtcacggcgtacgagcagaccgtgaaggaggagagcaacttccaaaaatccttcaacaaccacgtgcgcaccctgatcgcgcgcgaggaggtgaccctgggcctgatgcacctgtgggacctgctggaggccatcgtgcagaaccccaccagcaagccgctgacggcgcagctgttcctggtggtgcagcatagtcgggacaacgaagcgttcagggaggcgctgctgaatatcaccgagcccgagggccgctggctcctggacctggtgaacattctgcagagcatcgtggtgcaggagcgcgggctgccgctgtccgagaagctggcggccatcaacttctcggtgctgagtttgggcaagtactacgctaggaagatctacaagaccccgtacgtgcccatagacaaggaggtgaagatcgacgggttttacatgcgcatgaccctgaaagtgctgaccctgagcgacgatctgggggtgtaccgcaacgacaggatgcaccgtgcggtgagcgccagcaggcggcgcgagctgagcgaccaggagctgatgcatagtctgcagcgggccctgaccggggccgggaccgagggggagagctactttgacatgggcgcggacctgcactggcagcccagccgccgggccttggaggcggcggcaggaccctacgtagaagaggtggacgatgaggtggacgaggagggcgagtacctggaagactgatggcgcgaccgtatttttgctagatgcaacaacaacagccacctcctgatcccgcgatgcgggcggcgctgcagagccagccgtccggcattaactcctcggacgattggacccaggccatgcaacgcatcatggcgctgacgacccgcaaccccgaagcctttagacagcagccccaggccaaccggctctcggccatcctggaggccgtggtgccctcgcgctccaaccccacgcacgagaaggtcctggccatcgtgaacgcgctggtggagaacaaggccatccgcggcgacgaggccggcctggtgtacaacgcgctgctggagcgcgtggcccgctacaacagcaccaacgtgcagaccaacctggaccgcatggtgaccgacgtgcgcgaggccgtggcccagcgcgagcggttccaccgcgagtccaacctgggatccatggtggcgctgaacgccttcctcagcacccagcccgccaacgtgccccggggccaggaggactacaccaacttcatcagcgccctgcgcctgatggtgaccgaggtgccccagagcgaggtgtaccagtccgggccggactacttcttccagaccagtcgccagggcttgcagaccgtgaacctgagccaggctttcaagaacttgcagggcctgtggggcgtgcaggccccggtcggggaccgcgcgacggtgtcgagcctgctgacgccgaactcgcgcctgctgctgctgctggtggcccccttcacggacagcggcagcatcaaccgcaactcgtacctgggctacctgattaacctgtaccgcgaggccatcggccaggcgcacgtggacgagcagacctaccaggagatcacccacgtgagccgcgccctgggccaggacgacccgggcaacctggaagccaccctgaactttttgctgaccaaccggtcgcagaagatcccgccccagtacgcgctcagcaccgaggaggagcgcatcctgcgttacgtgcagcagagcgtgggcctgttcctgatgcaggagggggccacccccagcgccgcgctcgacatgaccgcgcgcaacatggagcccagcatgtacgccagcaaccgcccgttcatcaataaactgatggactacttgcatcgggcggccgccatgaactctgactatttcaccaacgccatcctgaatccccactggctcccgccgccggggttctacacgggcgagtacgacatgcccgaccccaatgacgggttcctgtgggacgatgtggacagcagcgtgttctccccccgaccgggtgctaacgagcgccccttgtggaagaaggaaggcagcgaccgacgcccgtcctcggcgctgtccggccgcgagggtgctgccgcggcggtgcccgaggccgccagtcctttcccgagcttgcccttctcgctgaacagtatccgcagcagcgagctgggcaggatcacgcgcccgcgcttgctgggcgaagaggagtacttgaatgactcgctgttgagacccgagcgggagaagaacttccccaataacgggatagaaagcctggtggacaagatgagccgctggaagacgtatgcgcaggagcacagggacgatccccgggcgtcgcagggggccacgagccggggcagcgccgcccgtaaacgccggtggcacgacaggcagcggggacagatgtgggacgatgaggactccgccgacgacagcagcgtgttggacttgggtgggagtggtaacccgttcgctcacctgcgcccccgtatcgggcgcatgatgtaagagaaaccgaaaataaatgatactcaccaaggccatggcgaccagcgtgcgttcgtttcttctctgttgttgttgtatctagtatgatgaggcgtgcgtacccggagggtcctcctccctcgtacgagagcgtgatgcagcaggcgatggcggcggcggcgatgcagcccccgctggaggctccttacgtgcccccgcggtacctggcgcctacggaggggcggaacagcattcgttactcggagctggcacccttgtacgataccacccggttgtacctggtggacaacaagtcggcggacatcgcctcgctgaactaccagaacgaccacagcaacttcctgaccaccgtggtgcagaacaatgacttcacccccacggaggccagcacccagaccatcaactttgacgagcgctcgcggtggggcggccagctgaaaaccatcatgcacaccaacatgcccaacgtgaacgagttcatgtacagcaacaagttcaaggcgcgggtgatggtctcccgcaagacccccaatggggtgacagtgacagaggattatgatggtagtcaggatgagctgaagtatgaatgggtggaatttgagctgcccgaaggcaacttctcggtgaccatgaccatcgacctgatgaacaacgccatcatcgacaattacttggcggtggggcggcagaacggggtgctggagagcgacatcggcgtgaagttcgacactaggaacttcaggctgggctgggaccccgtgaccgagctggtcatgcccggggtgtacaccaacgaggctttccatcccgatattgtcttgctgcccggctgcggggtggacttcaccgagagccgcctcagcaacctgctgggcattcgcaagaggcagcccttccaggaaggcttccagatcatgtacgaggatctggaggggggcaacatccccgcgctcctggatgtcgacgcctatgagaaaagcaaggaggatgcagcagctgaagcaactgcagccgtagctaccgcctctaccgaggtcaggggcgataattttgcaagcgccgcagcagtggcagcggccgaggcggctgaaaccgaaagtaagatagtcattcagccggtggagaaggatagcaagaacaggagctacaacgtactaccggacaagataaacaccgcctaccgcagctggtacctagcctacaactatggcgaccccgagaagggcgtgcgctcctggacgctgctcaccacctcggacgtcacctgcggcgtggagcaagtctactggtcgctgcccgacatgatgcaagacccggtcaccttccgctccacgcgtcaagttagcaactacccggtggtgggcgccgagctcctgcccgtctactccaagagcttcttcaacgagcaggccgtctactcgcagcagctgcgcgccttcacctcgcttacgcacgtcttcaaccgcttccccgagaaccagatcctcgtccgcccgcccgcgcccaccattaccaccgtcagtgaaaacgttcctgctctcacagatcacgggaccctgccgctgcgcagcagtatccggggagtccagcgcgtgaccgttactgacgccagacgccgcacctgcccctacgtctacaaggccctgggcatagtcgcgccgcgcgtcctctcgagccgcaccttctaaatgtccattctcatctcgcccagtaataacaccggttggggcctgcgcgcgcccagcaagatgtacggaggcgctcgccaacgctccacgcaacaccccgtgcgcgtgcgcgggcacttccgcgctccctggggcgccctcaagggccgcgtgcggtcgcgcaccaccgtcgacgacgtgatcgaccaggtggtggccgacgcgcgcaactacacccccgccgccgcgcccgtctccaccgtggacgccgtcatcgacagcgtggtggccgacgcgcgccggtacgcccgcgccaagagccggcggcggcgcatcgcccggcggcaccggagcacccccgccatgcgcgcggcgcgagccttgctgcgcagggccaggcgcacgggacgcagggccatgctcagggcggccagacgcgcggcttcaggcgccagcgccggcaggacccggagacgcgcggccacggcggcggcagcggccatcgccagcatgtcccgcccgcggcgagggaacgtgtactgggtgcgcgacgccgccaccggtgtgcgcgtgcccgtgcgcacccgcccccctcgcacttgaagatgttcacttcgcgatgttgatgtgtcccagcggcgaggaggatgtccaagcgcaaattcaaggaagagatgctccaggtcatcgcgcctgagatctacggccctgcggtggtgaaggaggaaagaaagccccgcaaaatcaagcgggtcaaaaaggacaaaaaggaagaagaaagtgatgtggacggattggtggagtttgtgcgcgagttcgccccccggcggcgcgtgcagtggcgcgggcggaaggtgcaaccggtgctgagacccggcaccaccgtggtcttcacgcccggcgagcgctccggcaccgcttccaagcgctcctacgacgaggtgtacggggatgatgatattctggagcaggcggccgagcgcctgggcgagtttgcttacggcaagcgcagccgttccgcaccgaaggaagaggcggtgtccatcccgctggaccacggcaaccccacgccgagcctcaagcccgtgaccttgcagcaggtgctgccgaccgcggcgccgcgccgggggttcaagcgcgagggcgaggatctgtaccccaccatgcagctgatggtgcccaagcgccagaagctggaagacgtgctggagaccatgaaggtggacccggacgtgcagcccgaggtcaaggtgcggcccatcaagcaggtggccccgggcctgggcgtgcagaccgtggacatcaagattcccacggagcccatggaaacgcagaccgagcccatgatcaagcccagcaccagcaccatggaggtgcagacggatccctggatgccatcggctcctagtcgaagaccccggcgcaagtacggcgcggccagcctgctgatgcccaactacgcgctgcatccttccatcatccccacgccgggctaccgcggcacgcgcttctaccgcggtcataccagcagccgccgccgcaagaccaccactcgccgccgccgtcgccgcaccgccgctgcaaccacccctgccgccctggtgcggagagtgtaccgccgcggccgcgcacctctgaccctgccgcgcgcgcgctaccacccgagcatcgccatttaaactttcgcctgctttgcagatcaatggccctcacatgccgccttcgcgttcccattacgggctaccgaggaagaaaaccgcgccgtagaaggctggcggggaacgggatgcgtcgccaccaccaccggcggcggcgcgccatcagcaagcggttggggggaggcttcctgcccgcgctgatccccatcatcgccgcggcgatcggggcgatccccggcattgcttccgtggcggtgcaggcctctcagcgccactgagacacacttggaaacatcttgtaataaaccaatggactctgacgctcctggtcctgtgatgtgttttcgtagacagatggaagacatcaatttttcgtccctggctccgcgacacggcacgcggccgttcatgggcacctggagcgacatcggcaccagccaactgaacgggggcgccttcaattggagcagtctctggagcgggcttaagaatttcgggtccacgcttaaaacctatggcagcaaggcgtggaacagcaccacagggcaggcgctgagggataagctgaaagagcagaacttccagcagaaggtggtcgatgggctcgcctcgggcatcaacggggtggtggacctggccaaccaggccgtgcagcggcagatcaacagccgcctggacccggtgccgcccgccggctccgtggagatgccgcaggtggaggaggagctgcctcccctggacaagcggggcgagaagcgaccccgccccgatgcggaggagacgctgctgacgcacacggacgagccgcccccgtacgaggaggcggtgaaactgggtctgcccaccacgcggcccatcgcgcccctggccaccggggtgctgaaacccgaaaagcccgcgaccctggacttgcctcctccccagccttcccgcccctctacagtggctaagcccctgccgccggtggccgtggcccgcgcgcgacccgggggcaccgcccgccctcatgcgaactggcagagcactctgaacagcatcgtgggtctgggagtgcagagtgtgaagcgccgccgctgctattaaacctaccgtagcgcttaacttgcttgtctgtgtgtgtatgtattatgtcgccgccgccgctgtccaccagaaggaggagtgaagaggcgcgtcgccgagttgcaagatggccaccccatcgatgctgccccagtgggcgtacatgcacatcgccggacaggacgcttcggagtacctgagtccgggtctggtgcagtttgcccgcgccacagacacctacttcagtctggggaacaagtttaggaaccccacggtggcgcccacgcacgatgtgaccaccgaccgcagccagcggctgacgctgcgcttcgtgcccgtggaccgcgaggacaacacctactcgtacaaagtgcgctacacgctggccgtgggcgacaaccgcgtgctggacatggccagcacctactttgacatccgcggcgtgctggatcggggccctagcttcaaaccctactccggcaccgcctacaacagtctggcccccaagggagcacccaacacttgtcagtggacatataaagccgatggtgaaactgccacagaaaaaacctatacatatggaaatgcacccgtgcagggcattaacatcacaaaagatggtattcaacttggaactgacaccgatgatcagccaatctacgcagataaaacctatcagcctgaacctcaagtgggtgatgctgaatggcatgacatcactggtactgatgaaaagtatggaggcagagctcttaagcctgataccaaaatgaagccttgttatggttcttttgccaagcctactaataaagaaggaggtcaggcaaatgtgaaaacaggaacaggcactactaaagaatatgacatagacatggctttctttgacaacagaagtgcggctgctgctggcctagctccagaaattgttttgtatactgaaaatgtggatttggaaactccagatacccatattgtatacaaagcaggcacagatgacagcagctcttctattaatttgggtcagcaagccatgcccaacagacctaactacattggtttcagagacaactttatcgggctcatgtactacaacagcactggcaatatgggggtgctggccggtcaggcttctcagctgaatgctgtggttgacttgcaagacagaaacaccgagctgtcctaccagctcttgcttgactctctgggtgacagaacccggtatttcagtatgtggaatcaggcggtggacagctatgatcctgatgtgcgcattattgaaaatcatggtgtggaggatgaacttcccaactattgtttccctctggatgctgttggcagaacagatacttatcagggaattaaggctaatggaactgatcaaaccacatggaccaaagatgacagtgtcaatgatgctaatgagataggcaagggtaatccattcgccatggaaatcaacatccaagccaacctgtggaggaacttcctctacgccaacgtggccctgtacctgcccgactcttacaagtacacgccggccaatgttaccctgcccaccaacaccaacacctacgattacatgaacggccgggtggtggcgccctcgctggtggactcctacatcaacatcggggcgcgctggtcgctggatcccatggacaacgtgaaccccttcaaccaccaccgcaatgcggggctgcgctaccgctccatgctcctgggcaacgggcgctacgtgcccttccacatccaggtgccccagaaatttttcgccatcaagagcctcctgctcctgcccgggtcctacacctacgagtggaacttccgcaaggacgtcaacatgatcctgcagagctccctcggcaacgacctgcgcacggacggggcctccatctccttcaccagcatcaacctctacgccaccttcttccccatggcgcacaacacggcctccacgctcgaggccatgctgcgcaacgacaccaacgaccagtccttcaacgactacctctcggcggccaacatgctctaccccatcccggccaacgccaccaacgtgcccatctccatcccctcgcgcaactgggccgccttccgcggctggtccttcacgcgtctcaagaccaaggagacgccctcgctgggctccgggttcgacccctacttcgtctactcgggctccatcccctacctcgacggcaccttctacctcaaccacaccttcaagaaggtctccatcaccttcgactcctccgtcagctggcccggcaacgaccggctcctgacgcccaacgagttcgaaatcaagcgcaccgtcgacggcgagggctacaacgtggcccagtgcaacatgaccaaggactggttcctggtccagatgctggcccactacaacatcggctaccagggcttctacgtgcccgagggctacaaggaccgcatgtactccttcttccgcaacttccagcccatgagccgccaggtggtggacgaggtcaactacaaggactaccaggccgtcaccctggcctaccagcacaacaactcgggcttcgtcggctacctcgcgcccaccatgcgccagggccagccctaccccgccaactacccctacccgctcatcggcaagagcgccgtcaccagcgtcacccagaaaaagttcctctgcgacagggtcatgtggcgcatccccttctccagcaacttcatgtccatgggcgcgctcaccgacctcggccagaacatgctctatgccaactccgcccacgcgctagacatgaatttcgaagtcgaccccatggatgagtccacccttctctatgttgtcttcgaagtcttcgacgtcgtccgagtgcaccagccccaccgcggcgtcatcgaggccgtctacctgcgcacccccttctcggccggtaacgccaccacctaagctcttgcttcttgcaagccatggccgcgggctccggcgagcaggagctcagggccatcatccgcgacctgggctgcgggccctacttcctgggcaccttcgataagcgcttcccgggattcatggccccgcacaagctggcctgcgccatcgtcaacacggccggccgcgagaccgggggcgagcactggctggccttcgcctggaacccgcgctcgaacacctgctacctcttcgaccccttcgggttctcggacgagcgcctcaagcagatctaccagttcgagtacgagggcctgctgcgccgcagcgccctggccaccgaggaccgctgcgtcaccctggaaaagtccacccagaccgtgcagggtccgcgctcggccgcctgcgggctcttctgctgcatgttcctgcacgccttcgtgcactggcccgaccgccccatggacaagaaccccaccatgaacttgctgacgggggtgcccaacggcatgctccagtcgccccaggtggaacccaccctgcgccgcaaccaggaggcgctctaccgcttcctcaactcccactccgcctactttcgctcccaccgcgcgcgcatcgagaaggccaccgccttcgaccgcatgaatcaagacatgtaaaccgtgtgtgtatgttaaatgtctttaataaacagcactttcatgttacacatgcatctgagatgatttatttagaaatcgaaagggttctgccgggtctcggcatggcccgcgggcagggacacgttgcggaactggtacttggccagccacttgaactcggggatcagcagtttgggcagcggggtgtcggggaaggagtcggtccacagcttccgcgtcagttgcagggcgcccagcaggtcgggcgcggagatcttgaaatcgcagttgggacccgcgttctgcgcgcgggagttgcggtacacggggttgcagcactggaacaccatcagggccgggtgcttcacgctcgccagcaccgtcgcgtcggtgatgctctccacgtcgaggtcctcggcgttggccatcccgaagggggtcatcttgcaggtctgccttcccatggtgggcacgcacccgggcttgtggttgcaatcgcagtgcagggggatcagcatcatctgggcctggtcggcgttcatccccgggtacatggccttcatgaaagcctccaattgcctgaacgcctgctgggccttggctccctcggtgaagaagaccccgcaggacttgctagagaactggttggtggcgcacccggcgtcgtgcacgcagcagcgcgcgtcgttgttggccagctgcaccacgctgcgcccccagcggttctgggtgatcttggcccggtcggggttctccttcagcgcgcgctgcccgttctcgctcgccacatccatctcgatcatgtgctccttctggatcatggtggtcccgtgcaggcaccgcagcttgccctcggcctcggtgcacccgtgcagccacagcgcgcacccggtgcactcccagttcttgtgggcgatctgggaatgcgcgtgcacgaagccctgcaggaagcggcccatcatggtggtcagggtcttgttgctagtgaaggtcagcggaatgccgcggtgctcctcgttgatgtacaggtggcagatgcggcggtacacctcgccctgctcgggcatcagctggaagttggctttcaggtcggtctccacgcggtagcggtccatcagcatagtcatgatttccatacccttctcccaggccgagacgatgggcaggctcatagggttcttcaccatcatcttagcgctagcagccgcggccagggggtcgctctcgtccagggtctcaaagctccgcttgccgtccttctcggtgatccgcaccggggggtagctgaagcccacggccgccagctcctcctcggcctgtctttcgtcctcgctgtcctggctgacgtcctgcaggaccacatgcttggtcttgcggggtttcttcttgggcggcagcggcggcggagatgttggagatggcgagggggagcgcgagttctcgctcaccactactatctcttcctcttcttggtccgaggccacgcggcggtaggtatgtctcttcgggggcagaggcggaggcgacgggctctcgccgccgcgacttggcggatggctggcagagccccttccgcgttcgggggtgcgctcccggcggcgctctgactgacttcctccgcggccggccattgtgttctcctagggaggaacaacaagcatggagactcagccatcgccaacctcgccatctgcccccaccgccgacgagaagcagcagcagcagaatgaaagcttaaccgccccgccgcccagccccgccacctccgacgcggccgtcccagacatgcaagagatggaggaatccatcgagattgacctgggctatgtgacgcccgcggagcacgaggaggagctggcagtgcgcttttcacaagaagagatacaccaagaacagccagagcaggaagcagagaatgagcagagtcaggctgggctcgagcatgacggcgactacctccacctgagcgggggggaggacgcgctcatcaagcatctggcccggcaggccaccatcgtcaaggatgcgctgctcgaccgcaccgaggtgcccctcagcgtggaggagctcagccgcgcctacgagttgaacctcttctcgccgcgcgtgccccccaagcgccagcccaatggcacctgcgagcccaacccgcgcctcaacttctacccggtcttcgcggtgcccgaggccctggccacctaccacatctttttcaagaaccaaaagatccccgtctcctgccgcgccaaccgcacccgcgccgacgcccttttcaacctgggtcccggcgcccgcctacctgatatcgcctccttggaagaggttcccaagatcttcgagggtctgggcagcgacgagactcgggccgcgaacgctctgcaaggagaaggaggagagcatgagcaccacagcgccctggtcgagttggaaggcgacaacgcgcggctggcggtgctcaaacgcacggtcgagctgacccatttcgcctacccggctctgaacctgccccccaaagtcatgagcgcggtcatggaccaggtgctcatcaagcgcgcgtcgcccatctccgaggacgagggcatgcaagactccgaggagggcaagcccgtggtcagcgacgagcagctggcccggtggctgggtcctaatgctagtccccagagtttggaagagcggcgcaaactcatgatggccgtggtcctggtgaccgtggagctggagtgcctgcgccgcttcttcgccgacgcggagaccctgcgcaaggtcgaggagaacctgcactacctcttcaggcacgggttcgtgcgccaggcctgcaagatctccaacgtggagctgaccaacctggtctcctacatgggcatcttgcacgagaaccgcctggggcagaacgtgctgcacaccaccctgcgcggggaggcccggcgcgactacatccgcgactgcgtctacctctacctctgccacacctggcagacgggcatgggcgtgtggcagcagtgtctggaggagcagaacctgaaagagctctgcaagctcctgcagaagaacctcaagggtctgtggaccgggttcgacgagcgcaccaccgcctcggacctggccgacctcattttccccgagcgcctcaggctgacgctgcgcaacggcctgcccgactttatgagccaaagcatgttgcaaaactttcgctctttcatcctcgaacgctccggaatcctgcccgccacctgctccgcgctgccctcggacttcgtgccgctgaccttccgcgagtgccccccgccgctgtggagccactgctacctgctgcgcctggccaactacctggcctaccactcggacgtgatcgaggacgtcagcggcgagggcctgctcgagtgccactgccgctgcaacctctgcacgccgcaccgctccctggcctgcaacccccagctgctgagcgagacccagatcatcggcaccttcgagttgcaagggcccagcgaaggcgagggttcagccgccaaggggggtctgaaactcaccccggggctgtggacctcggcctacttgcgcaagttcgtgcccgaggactaccatcccttcgagatcaggttctacgaggaccaatcccatccgcccaaggccgagctgtcggcctgcgtcatcacccagggggcgatcctggcccaattgcaagccatccagaaatcccgccaagaattcttgctgaaaaagggccgcggggtctacctcgacccccagaccggtgaggagctcaaccccggcttcccccaggatgccccgaggaaacaagaagctgaaagtggagctgccgcccgtggaggatttggaggaagactgggagaacagcagtcaggcagaggaggaggagatggaggaagactgggacagcactcaggcagaggaggacagcctgcaagacagtctggaggaagacgaggaggaggcagaggaggaggtggaagaagcagccgccgccagaccgtcgtcctcggcgggggagaaagcaagcagcacggataccatctccgctccgggtcggggtcccgctcgaccacacagtagatgggacgagaccggacgattcccgaaccccaccacccagaccggtaagaaggagcggcagggatacaagtcctggcgggggcacaaaaacgccatcgtctcctgcttgcaggcctgcgggggcaacatctccttcacccggcgctacctgctcttccaccgcggggtgaactttccccgcaacatcttgcattactaccgtcacctccacagcccctactacttccaagaagaggcagcagcagcagaaaaagaccagcagaaaaccagcagctagaaaatccacagcggcggcagcaggtggactgaggatcgcggcgaacgagccggcgcaaacccgggagctgaggaaccggatctttcccaccctctatgccatcttccagcagagtcgggggcaggagcaggaactgaaagtcaagaaccgttctctgcgctcgctcacccgcagttgtctgtatcacaagagcgaagaccaacttcagcgcactctcgaggacgccgaggctctcttcaacaagtactgcgcgctcactcttaaagagtagcccgcgcccgcccagtcgcagaaaaaggcgggaattacgtcacctgtgcccttcgccctagccgcctccacccatcatcatgagcaaagagattcccacgccttacatgtggagctaccagccccagatgggcctggccgccggtgccgcccaggactactccacccgcatgaattggctcagcgccgggcccgcgatgatctcacgggtgaatgacatccgcgcccaccgaaaccagatactcctagaacagtcagcgctcaccgccacgccccgcaatcacctcaatccgcgtaattggcccgccgccctggtgtaccaggaaattccccagcccacgaccgtactacttccgcgagacgcccaggccgaagtccagctgactaactcaggtgtccagctggcgggcggcgccaccctgtgtcgtcaccgccccgctcagggtataaagcggctggtgatccggggcagaggcacacagctcaacgacgaggtggtgagctcttcgctgggtctgcgacctgacggagtcttccaactcgccggatcggggagatcttccttcacgcctcgtcaggccgtcctgactttggagagttcgtcctcgcagccccgctcgggtggcatcggcactctccagttcgtggaggagttcactccctcggtctacttcaaccccttctccggctcccccggccactacccggacgagttcatcccgaacttcgacgccatcagcgagtcggtggacggctacgattgaaactaatcacccccttatccagtgaaataaagatcatattgatgatgattttacagaaataaaaaataatcatttgatttgaaataaagatacaatcatattgatgatttgagtttaacaaaaaaataaagaatcacttacttgaaatctgataccaggtctctgtccatgttttctgccaacaccacttcactcccctcttcccagctctggtactgcaggccccggcgggctgcaaacttcctccacacgctgaaggggatgtcaaattcctcctgtccctcaatcttcattttatcttctatcagatgtccaaaaagcgcgtccgggtggatgatgacttcgaccccgtctacccctacgatgcagacaacgcaccgaccgtgcccttcatcaacccccccttcgtctcttcagatggattccaagagaagcccctgggggtgttgtccctgcgactggccgaccccgtcaccaccaagaacggggaaatcaccctcaagctgggagagggggtggacctcgattcctcgggaaaactcatctccaacacggccaccaaggccgccgcccctctcagtttttccaacaacaccatttcccttaacatggatcaccccttttacactaaagatggaaaattatccttacaagtttctccaccattaaatatactgagaacaagcattctaaacacactagctttaggttttggatcaggtttaggactccgtggctctgccttggcagtacagttagtctctccacttacatttgatactgatggaaacataaagcttaccttagacagaggtttgcatgttacaacaggagatgcaattgaaagcaacataagctgggctaaaggtttaaaatttgaagatggagccatagcaaccaacattggaaatgggttagagtttggaagcagtagtacagaaacaggtgttgatgatgcttacccaatccaagttaaacttggatctggccttagctttgacagtacaggagccataatggctggtaacaaagaagacgataaactcactttgtggacaacacctgatccatcaccaaactgtcaaatactcgcagaaaatgatgcaaaactaacactttgcttgactaaatgtggtagtcaaatactggccactgtgtcagtcttagttgtaggaagtggaaacctaaaccccattactggcaccgtaagcagtgctcaggtgtttctacgttttgatgcaaacggtgttcttttaacagaacattctacactaaaaaaatactgggggtataggcagggagatagcatagatggcactccatataccaatgctgtaggattcatgcccaatttaaaagcttatccaaagtcacaaagttctactactaaaaataatatagtagggcaagtatacatgaatggagatgtttcaaaacctatgcttctcactataaccctcaatggtactgatgacagcaacagtacatattcaatgtcattttcatacacctggactaatggaagctatgttggagcaacatttggggctaactcttataccttctcatacatcgcccaagaatgaacactgtatcccaccctgcatgccaacccttcccaccccactctgtggaacaaactctgaaacacaaaataaaataaagttcaagtgttttattgattcaacagttttacaggattcgagcagttatttttcctccaccctcccaggacatggaatacaccaccctctccccccgcacagccttgaacatctgaatgccattggtgatggacatgcttttggtctccacgttccacacagtttcagagcgagccagtctcgggtcggtcagggagatgaaaccctccgggcactcccgcatctgcacctcacagctcaacagctgaggattgtcctcggtggtcgggatcacggttatctggaagaagcagaagagcggcggtgggaatcatagtccgcgaacgggatcggccggtggtgtcgcatcaggccccgcagcagtcgctgccgccgccgctccgtcaagctgctgctcagggggtccgggtccagggactccctcagcatgatgcccacggccctcagcatcagtcgtctggtgcggcgggcgcagcagcgcatgcggatctcgctcaggtcgctgcagtacgtgcaacacagaaccaccaggttgttcaacagtccatagttcaacacgctccagccgaaactcatcgcgggaaggatgctacccacgtggccgtcgtaccagatcctcaggtaaatcaagtggtgccccctccagaacacgctgcccacgtacatgatctccttgggcatgtggcggttcaccacctcccggtaccacatcaccctctggttgaacatgcagccccggatgatcctgcggaaccacagggccagcaccgccccgcccgccatgcagcgaagagaccccgggtcccggcaatggcaatggaggacccaccgctcgtacccgtggatcatctgggagctgaacaagtctatgttggcacagcacaggcatatgctcatgcatctcttcagcactctcaactcctcgggggtcaaaaccatatcccagggcacggggaactcttgcaggacagcgaaccccgcagaacagggcaatcctcgcacagaacttacattgtgcatggacagggtatcgcaatcaggcagcaccgggtgatcctccaccagagaagcgcgggtctcggtctcctcacagcgtggtaagggggccggccgatacgggtgatggcgggacgcggctgatcgtgttcgcgaccgtgtcatgatgcagttgctttcggacattttcgtacttgctgtagcagaacctggtccgggcgctgcacaccgatcgccggcggcggtctcggcgcttggaacgctcggtgttgaaattgtaaaacagccactctctcagaccgtgcagcagatctagggcctcaggagtgatgaagatcccatcatgcctgatggctctgatcacatcgaccaccgtggaatgggccagacccagccagatgatgcaattttgttgggtttcggtgacggcgggggagggaagaacaggaagaaccatgattaacttttaatccaaacggtctcggagtacttcaaaatgaagatcgcggagatggcacctctcgcccccgctgtgttggtggaaaataacagccaggtcaaaggtgatacggttctcgagatgttccacggtggcttccagcaaagcctccacgcgcacatccagaaacaagacaatagcgaaagcgggagggttctctaattcctcaatcatcatgttacactcctgcaccatccccagataattttcatttttccagccttgaatgattcgaactagttcctgaggtaaatccaagccagccatgataaagagctcgcgcagagcgccctccaccggcattcttaagcacaccctcataattccaagatattctgctcctggttcacctgcagcagattgacaagcggaatatcaaaatctctgccgcgatccctgagctcctccctcagcaataactgtaagtactctttcatatcctctccgaaatttttagccataggaccaccaggaataagattagggcaagccacagtacagataaaccgaagtcctccccagtgagcattgccaaatgcaagactgctataagcatgctggctagacccggtgatatcttccagataactggacagaaaatcgcccaggcaatttttaagaaaatcaacaaaagaaaaatcctccaggtggacgtttagagcctcgggaacaacgatgaagtaaatgcaagcggtgcgttccagcatggttagttagctgatctgtagaaaaaacaaaaatgaacattaaaccatgctagcctggcgaacaggtgggtaaatcgttctctccagcaccaggcaggccacggggtctccggcgcgaccctcgtaaaaattgtcgctatgattgaaaaccatcacagagagacgttcccggtggccggcgtgaatgattcgacaagatgaatacacccccggaacattggcgtccgcgagtgaaaaaaagcgcccgaggaagcaataaggcactacaatgctcagtctcaagtccagcaaagcgatgccatgcggatgaagcacaaaattctcaggtgcgtacaaaatgtaattactcccctcctgcacaggcagcaaagcccccgatccctccaggtacacatacaaagcctcagcgtccatagcttaccgagcagcagcacacaacaggcgcaagagtcagagaaaggctgagctctaacctgtccacccgctctctgctcaatatatagcccagatctacactgacgtaaaggccaaagtctaaaaatacccgccaaataatcacacacgcccagcacacgcccagaaaccggtgacacactcaaaaaaatacgcgcacttcctcaaacgcccaaaactgccgtcatttccgggttcccacgctacgtcatcaaaacacgactttcaaattccgtcgaccgttaaaaacgtcacccgccccgcccctaacggtcgcccgtctctcagccaatcagcgccccgcatccccaaattcaaacacctcatttgcatattaacgcgcacaaaaagtttgaggtatattattgatgatggttaattaa

SEQ ID NO: 72 - DNA, 34360 bp, Artificial Sequence
  Description of Artificial Sequence: Synthetic polynucleotide
catcatcaataatatacctcaaactttttgtgcgcgttaatatgcaaatgaggcgtttgaatttggggaggaagggcggtgattggtcgagggatgagcgaccgttaggggcggggcgagtgacgttttgatgacgtggttgcgaggaggagccagtttgcaagttctcgtgggaaaagtgacgtcaaacgaggtgtggtttgaacacggaaatactcaattttcccgcgctctctgacaggaaatgaggtgtttctgggcggatgcaagtgaaaacgggccattttcgcgcgaaaactgaatgaggaagtgaaaatctgagtaatttcgcgtttatggcagggaggagtatttgccgagggccgagtagactttgaccgattacgtgggggtttcgattaccgtgtttttcacctaaatttccgcgtacggtgtcaaagtccggtgtttttacgtaggtgtcagctgatcgccagggtatttaaacctgcgctctccagtcaagaggccactcttgagtgccagcgagaagagttttctcctccgcgccgcgagtcagatctacactttgaaagtagggataacagggtaatgacattgattattgactagttgttaatagtaatcaattacggggtcattagttcatagcccatatatggagttccgcgttacataacttacggtaaatggcccgcctggctgaccgcccaacgacccccgcccattgacgtcaataatgacgtatgttcccatagtaacgccaatagggactttccattgacgtcaatgggtggagtatttacggtaaactgcccacttggcagtacatcaagtgtatcatatgccaagtccgccccctattgacgtcaatgacggtaaatggcccgcctggcattatgcccagtacatgaccttacgggactttcctacttggcagtacatctacgtattagtcatcgctattaccatggtgatgcggttttggcagtacaccaatgggcgtggatagcggtttgactcacggggatttccaagtctccaccccattgacgtcaatgggagtttgttttggcaccaaaatcaacgggactttccaaaatgtcgtaataaccccgccccgttgacgcaaatgggcggtaggcgtgtacggtgggaggtctatataagcagagctcgtttagtgaaccgtcagatcgcctggaacgccatccacgctgttttgacctccatagaagacagcgatcgcgccaccatggccgggatgttccaggcactgtccgaaggctgcacaccctatgatattaaccagatgctgaatgtcctgggagaccaccaggtctctggcctggagcagctggagagcatcatcaacttcgagaagctgaccgagtggacaagctccaatgtgatgcctatcctgtccccactgaccaagggcatcctgggcttcgtgtttaccctgacagtgccttctgagcggggcctgtcttgcatcagcgaggcagacgcaaccacaccagagtccgccaatctgggcgaggagatcctgtctcagctgtacctgtggccccgggtgacatatcactccccttcttacgcctatcaccagttcgagcggagagccaagtacaagagacacttcccaggctttggccagtctctgctgttcggctaccccgtgtacgtgttcggcgattgcgtgcagggcgactgggatgccatccggtttagatactgcgcaccacctggatatgcactgctgaggtgtaacgacaccaattattccgccctgctggcagtgggcgccctggagggccctcgcaatcaggattggctgggcgtgccaaggcagctggtgacacgcatgcaggccatccagaacgcaggcctgtgcaccctggtggcaatgctggaggagacaatcttctggctgcaggcctttctgatggccctgaccgacagcggccccaagacaaacatcatcgtggattcccagtacgtgatgggcatctccaagccttctttccaggagtttgtggactgggagaacgtgagcccagagctgaattccaccgatcagccattctggcaggcaggaatcctggcaaggaacctggtgcctatggtggccacagtgcagggccagaatctgaagtaccagggccagagcctggtcatcagcgcctccatcatcgtgtttaacctgctggagctggagggcgactatcgggacgatggcaacgtgtgggtgcacaccccactgagccccagaacactgaacgcctgggtgaaggccgtggaggagaagaagggcatcccagtgcacctggagctggcctccatgaccaatatggagctgatgtctagcatcgtgcaccagcaggtgaggacatacggacccgtgttcatgtgcctgggaggcctgctgaccatggtggcaggagccgtgtggctgacagtgcgggtgctggagctgttcagagccgcccagctggccaacgatgtggtgctgcagatcatggagctgtgcggagcagcctttcgccaggtgtgccacaccacagtgccatggcccaatgcctccctgacccccaagtggaacaatgagacaacacagcctcagatcgccaactgtagcgtgtacgacttcttcgtgtggctgcactactatagcgtgagggataccctgtggccccgcgtgacataccacatgaataagtacgcctatcacatgctggagaggcgcgccaagtataagagaggccctggcccaggcgcaaagtttgtggcagcatggaccctgaaggccgccgccggccccggccccggccagtatatcaaggctaacagtaagttcattggaatcacagagctgggacccggacctggataatgagtttaaaccgttactggccgaagccgcttggaataaggccggtgtgcgtttgtctatatgttattttccaccatattgccgtcttttggcaatgtgagggcccggaaacctggccctgtcttcttgacgagcattcctaggggtctttcccctctcgccaaaggaatgcaaggtctgttgaatgtcgtgaaggaagcagttcctctggaagcttcttgaagacaaacaacgtctgtagcgaccctttgcaggcagcggaaccccccacctggcgacaggtgcctctgcggccaaaagccacgtgtataagatacacctgcaaaggcggcacaaccccagtgccacgttgtgagttggatagttgtggaaagagtcaaatggctctcctcaagcgtattcaacaaggggctgaaggatgcccagaaggtaccccattgtatgggatctgatctggggcctcggtgcacatgctttacatgtgtttagtcgaggttaaaaaacgtctaggccccccgaaccacggggacgtggttttcctttgaaaaacacgatgataatatgggctggtcctgcatcatcctgtttctggtggctacagccacaggcgtgcactctcaggtgcaactggttgaatctggtggcggagtggtgcagcctggcagatctctgagactgtcttgtgctgccagcggcttcaccttcagcagctatggcatgcactgggttcgacaggcccctggcaaaggactggaatgggttgccgtgatttggtacgacggcagcaacaagtactacgccgacagcgtgaagggcagattcaccatctccagagacaacagcaagaacaccctgtacctgcagatgaacagcctgagagccgaggacaccgccgtgtactattgcgctagagatcctagaggcgccacactgtactactactattacggcatggacgtgtggggccagggcaccacagttacagtgtctagcgcctctacaaagggcccctccgtttttcctctggctccttgttctagaagcaccagcgagtctacagccgctctgggctgtctggtcaaggactactttcctgagcctgtgaccgtgtcctggaattctggtgctctgacaagcggcgtgcacacctttccagccgtgctgcaaagcagcggcctgtactctctgtctagcgtggtcaccgtgcctagcagcaatttcggcacccagacctacacctgtaacgtggaccacaagcctagcaacaccaaggtggacaagaccgtggaacggaagtgctgcgtggaatgccctccttgtcctgctcctccagtggccggaccttccgtgtttctgttccctccaaagcctaaggacaccctgatgatcagcagaacccctgaagtgacctgcgtggtggtggatgtgtctcacgaggatcccgaggtgcagttcaattggtacgtggacggcgtggaagtgcacaacgccaagaccaagcctagagaggaacagttcaactccaccttcagagtggtgtccgtgctgaccgtggtgcatcaggactggctgaacggcaaagagtacaagtgcaaggtgtccaacaagggcctgcctgctcctatcgagaaaaccatcagcaagaccaaaggccagcctcgcgagcctcaggtttacacactgcctccaagccgggaagagatgaccaagaatcaggtgtccctgacctgcctggttaagggcttctaccccagcgacatctccgtggaatgggagtctaatggccagccagagaacaactacaagaccacacctcctatgctggactccgatggctcattcttcctgtacagcaagctgacagtggacaagtccagatggcagcagggcaacgtgttcagctgttctgtgatgcacgaggccctgcacaaccactacacccagaagtctctgtctctgagccccggcaaacggaagagaagaggcgttagagccgaaggcagaggctctctgctgacatgcggagatgtggaagagaaccccggacctatggacatgagagtgcctgctcaactgctgggactgctgcttctttggctgcctggcgctagatgcgacatccagatgacacagagccctagcagcctgtctgcctctgtgggcgatagagtgaccatcacctgtcgggcctctcagagcatcaacagctacctggactggtatcagcaaaagcccggcaaggcccctaagctgctgatctatgccgctagctctctgcagtctggcgtgccaagcagattttctggcagcggctctggcaccgacttcaccctgacaatttctagcctgcagcctgaggacttcgccacctactactgccagcagtactacagcacccctttcacattcggccctggcacaaaggtggaaatcaagagaacagtggccgctccgagcgtgttcatctttccacctagcgacgagcagctgaaaagcggcacagcctctgtcgtgtgcctgctgaacaacttctaccctcgggaagccaaggtgcagtggaaagtggataatgccctgcagagcggcaacagccaagagagcgtgacagagcaggatagcaaggacagcacctatagcctgagcagcacactgaccctgagcaaggccgactacgagaagcacaaggtgtacgcctgcgaagtgacacaccagggactgagcagccctgtgaccaagagcttcaacagaggcgagtgctgatagatttaaatgtgagggttaatgcttcgagcagacatgataagatacattgatgagtttggacaaaccacaactagaatgcagtgaaaaaaatgctttatttgtgaaatttgtgatgctattgctttatttgtaaccattataagctgcaataaacaagttaacaacaacaattgcattcattttatgtttcaggttcagggggagatgtgggaggttttttaaagcaagtaaaacctctacaaatgtggtaaaataactataacggtcctaaggtagcgagtgagtagtgttctggggcgggggaggacctgcatgagggccagaataactgaaatctgtgcttttctgtgtgttgcagcagcatgagcggaagcggctcctttgagggaggggtattcagcccttatctgacggggcgtctcccctcctgggcgggagtgcgtcagaatgtgatgggatccacggtggacggccggcccgtgcagcccgcgaactcttcaaccctgacctatgcaaccctgagctcttcgtcgttggacgcagctgccgccgcagctgctgcatctgccgccagcgccgtgcgcggaatggccatgggcgccggctactacggcactctggtggccaactcgagttccaccaataatcccgccagcctgaacgaggagaagctgttgctgctgatggcccagctcgaggccttgacccagcgcctgggcgagctgacccagcaggtggctcagctgcaggagcagacgcgggccgcggttgccacggtgaaatccaaataaaaaatgaatcaataaataaacggagacggttgttgattttaacacagagtctgaatctttatttgatttttcgcgcgcggtaggccctggaccaccggtctcgatcattgagcacccggtggatcttttccaggacccggtagaggtgggcttggatgttgaggtacatgggcatgagcccgtcccgggggtggaggtagctccattgcagggcctcgtgctcgggggtggtgttgtaaatcacccagtcatagcaggggcgcagggcatggtgttgcacaatatctttgaggaggagactgatggccacgggcagccctttggtgtaggtgtttacaaatctgttgagctgggagggatgcatgcggggggagatgaggtgcatcttggcctggatcttgagattggcgatgttaccgcccagatcccgcctggggttcatgttgtgcaggaccaccagcacggtgtatccggtgcacttggggaatttatcatgcaacttggaagggaaggcgtgaaagaatttggcgacgcctttgtgcccgcccaggttttccatgcactcatccatgatgatggcgatgggcccgtgggcggcggcctgggcaaagacgtttcgggggtcggacacatcatagttgtggtcctgggtgaggtcatcataggccattttaatgaatttggggcggagggtgccggactgggggacaaaggtaccctcgatcccgggggcgtagttcccctcacagatctgcatctcccaggctttgagctcggagggggggatcatgtccacctgcggggcgataaagaacacggtttccggggcgggggagatgagctgggccgaaagcaagttccggagcagctgggacttgccgcagccggtggggccgtagatgaccccgatgaccggctgcaggtggtagttgagggagagacagctgccgtcctcccggaggaggggggccacctcgttcatcatctcgcgcacgtgcatgttctcgcgcaccagttccgccaggaggcgctctccccccagggataggagctcctggagcgaggcgaagtttttcagcggcttgagtccgtcggccatgggcattttggagagggtttgttgcaagagttccaggcggtcccagagctcggtgatgtgctctacggcatctcgatccagcagacctcctcgtttcgcgggttgggacggctgcgggagtagggcaccagacgatgggcgtccagcgcagccagggtccggtccttccagggtcgcagcgtccgcgtcagggtggtctccgtcacggtgaaggggtgcgcgccgggctgggcgcttgcgagggtgcgcttcaggctcatccggctggtcgaaaaccgctcccgatcggcgccctgcgcgtcggccaggtagcaattgaccatgagttcgtagttgagcgcctcggccgcgtggcctttggcgcggagcttacctttggaagtctgcccgcaggcgggacagaggagggacttgagggcgtagagcttgggggcgaggaagacggactcgggggcgtaggcgtccgcgccgcagtgggcgcagacggtctcgcactccacgagccaggtgaggtcgggctggtcggggtcaaaaaccagtttcccgccgttctttttgatgcgtttcttacctttggtctccatgagctcgtgtccccgctgggtgacaaagaggctgtccgtgtccccgtagaccgactttatgggccggtcctcgagcggtgtgccgcggtcctcctcgtagaggaaccccgcccactccgagacgaaagcccgggtccaggccagcacgaaggaggccacgtgggacgggtagcggtcgttgtccaccagcgggtccaccttttccagggtatgcaaacacatgtccccctcgtccacatccaggaaggtgattggcttgtaagtgtaggccacgtgaccgggggtcccggccgggggggtataaaagggtgcgggtccctgctcgtcctcactgtcttccggatcgctgtccaggagcgccagctgttggggtaggtattccctctcgaaggcgggcatgacctcggcactcaggttgtcagtttctagaaacgaggaggatttgatattgacggtgccggcggagatgcctttcaagagcccctcgtccatctggtcagaaaagacgatctttttgttgtcgagcttggtggcgaaggagccgtagagggcgttggagaggagcttggcgatggagcgcatggtctggtttttttccttgtcggcgcgctccttggcggcgatgttgagctgcacgtactcgcgcgccacgcacttccattcggggaagacggtggtcagctcgtcgggcacgattctgacctgccagccccgattatgcagggtgatgaggtccacactggtggccacctcgccgcgcaggggctcattagtccagcagaggcgtccgcccttgcgcgagcagaaggggggcagggggtccagcatgacctcgtcgggggggtcggcatcgatggtgaagatgccgggcaggaggtcggggtcaaagtagctgatggaagtggccagatcgtccagggcagcttgccattcgcgcacggccagcgcgcgctcgtagggactgaggggcgtgccccagggcatgggatgggtaagcgcggaggcgtacatgccgcagatgtcgtagacgtagaggggctcctcgaggatgccgatgtaggtggggtagcagcgccccccgcggatgctggcgcgcacgtagtcatacagctcgtgcgagggggcgaggagccccgggcccaggttggtgcgactgggcttttcggcgcggtagacgatctggcggaaaatggcatgcgagttggaggagatggtgggcctttggaagatgttgaagtgggcgtggggcagtccgaccgagtcgcggatgaagtgggcgtaggagtcttgcagcttggcgacgagctcggcggtgactaggacgtccagagcgcagtagtcgagggtctcctggatgatgtcatacttgagctgtcccttttgtttccacagctcgcggttgagaaggaactcttcgcggtccttccagtactcttcgagggggaacccgtcctgatctgcacggtaagagcctagcatgtagaactggttgacggccttgtaggcgcagcagcccttctccacggggagggcgtaggcctgggcggccttgcgcagggaggtgtgcgtgagggcgaaagtgtccctgaccatgaccttgaggaactggtgcttgaagtcgatatcgtcgcagcccccctgctcccagagctggaagtccgtgcgcttcttgtaggcggggttgggcaaagcgaaagtaacatcgttgaagaggatcttgcccgcgcggggcataaagttgcgagtgatgcggaaaggttggggcacctcggcccggttgttgatgacctgggcggcgagcacgatctcgtcgaagccgttgatgttgtggcccacgatgtagagttccacgaatcgcggacggcccttgacgtggggcagtttcttgagctcctcgtaggtgagctcgtcggggtcgctgagcccgtgctgctcgagcgcccagtcggcgagatgggggttggcgcggaggaaggaagtccagagatccacggccagggcggtttgcagacggtcccggtactgacggaactgctgcccgacggccattttttcgggggtgacgcagtagaaggtgcgggggtccccgtgccagcgatcccatttgagctggagggcgagatcgagggcgagctcgacgagccggtcgtccccggagagtttcatgaccagcatgaaggggacgagctgcttgccgaaggaccccatccaggtgtaggtttccacatcgtaggtgaggaagagcctttcggtgcgaggatgcgagccgatggggaagaactggatctcctgccaccaattggaggaatggctgttgatgtgatggaagtagaaatgccgacggcgcgccgaacactcgtgcttgtgtttatacaagcggccacagtgctcgcaacgctgcacgggatgcacgtgctgcacgagctgtacctgagttcctttgacgaggaatttcagtgggaagtggagtcgtggcgcctgcatctcgtgctgtactacgtcgtggtggtcggcctggccctcttctgcctcgatggtggtcatgctgacgagcccgcgcgggaggcaggtccagacctcggcgcgagcgggtcggagagcgaggacgagggcgcgcaggccggagctgtccagggtcctgagacgctgcggagtcaggtcagtgggcagcggcggcgcgcggttgacttgcaggagtttttccagggcgcgcgggaggtccagatggtacttgatctccaccgcgccattggtggcgacgtcgatggcttgcagggtcccgtgcccctggggtgtgaccaccgtcccccgtttcttcttgggcggctggggcgacgggggcggtgcctcttccatggttagaagcggcggcgaggacgcgcgccgggcggcaggggcggctcggggcccggaggcaggggcggcaggggcacgtcggcgccgcgcgcgggtaggttctggtactgcgcccggagaagactggcgtgagcgacgacgcgacggttgacgtcctggatctgacgcctctgggtgaaggccacgggacccgtgagtttgaacctgaaagagagttcgacagaatcaatctcggtatcgttgacggcggcctgccgcaggatctcttgcacgtcgcccgagttgtcctggtaggcgatctcggtcatgaactgctcgatctcctcctcttgaaggtctccgcggccggcgcgctccacggtggccgcgaggtcgttggagatgcggcccatgagctgcgagaaggcgttcatgcccgcctcgttccagacgcggctgtagaccacgacgccctcgggatcgcgggcgcgcatgaccacctgggcgaggttgagctccacgtggcgcgtgaagaccgcgtagttgcagaggcgctggtagaggtagttgagcgtggtggcgatgtgctcggtgacgaagaaatacatgatccagcggcggagcggcatctcgctgacgtcgcccagcgcctccaaacgttccatggcctcgtaaaagtccacggcgaagttgaaaaactgggagttgcgcgccgagacggtcaactcctcctccagaagacggatgagctcggcgatggtggcgcgcacctcgcgctcgaaggcccccgggagttcctccacttcctcttcttcctcctccactaacatctcttctacttcctcctcaggcggcagtggtggcgggggagggggcctgcgtcgccggcggcgcacgggcagacggtcgatgaagcgctcgatggtctcgccgcgccggcgtcgcatggtctcggtgacggcgcgcccgtcctcgcggggccgcagcgtgaagacgccgccgcgcatctccaggtggccgggggggtccccgttgggcagggagagggcgctgacgatgcatcttatcaattgccccgtagggactccgcgcaaggacctgagcgtctcgagatccacgggatctgaaaaccgctgaacgaaggcttcgagccagtcgcagtcgcaaggtaggctgagcacggtttcttctggcgggtcatgttggttgggagcggggcgggcgatgctgctggtgatgaagttgaaataggcggttctgagacggcggatggtggcgaggagcaccaggtctttgggcccggcttgctggatgcgcagacggtcggccatgccccaggcgtggtcctgacacctggccaggtccttgtagtagtcctgcatgagccgctccacgggcacctcctcctcgcccgcgcggccgtgcatgcgcgtgagcccgaagccgcgctggggctggacgagcgccaggtcggcgacgacgcgctcggcgaggatggcttgctggatctgggtgagggtggtctggaagtcatcaaagtcgacgaagcggtggtaggctccggtgttgatggtgtaggagcagttggccatgacggaccagttgacggtctggtggcccggacgcacgagctcgtggtacttgaggcgcgagtaggcgcgcgtgtcgaagatgtagtcgttgcaggtgcgcaccaggtactggtagccgatgaggaagtgcggcggcggctggcggtagagcggccatcgctcggtggcgggggcgccgggcgcgaggtcctcgagcatggtgcggtggtagccgtagatgtacctggacatccaggtgatgccggcggcggtggtggaggcgcgcgggaactcgcggacgcggttccagatgttgcgcagcggcaggaagtagttcatggtgggcacggtctggcccgtgaggcgcgcgcagtcgtggatgctctatacgggcaaaaacgaaagcggtcagcggctcgactccgtggcctggaggctaagcgaacgggttgggctgcgcgtgtaccccggttcgaatctcgaatcaggctggagccgcagctaacgtggtattggcactcccgtctcgacccaagcctgcaccaaccctccaggatacggaggcgggtcgttttgcaacttttttttggaggccggatgagactagtaagcgcggaaagcggccgaccgcgatggctcgctgccgtagtctggagaagaatcgccagggttgcgttgcggtgtgccccggttcgaggccggccggattccgcggctaacgagggcgtggctgccccgtcgtttccaagaccccatagccagccgacttctccagttacggagcgagcccctcttttgttttgtttgtttttgccagatgcatcccgtactgcggcagatgcgcccccaccaccctccaccgcaacaacagccccctccacagccggcgcttctgcccccgccccagcagcaacttccagccacgaccgccgcggccgccgtgagcggggctggacagagttatgatcaccagctggccttggaagagggcgaggggctggcgcgcctgggggcgtcgtcgccggagcggcacccgcgcgtgcagatgaaaagggacgctcgcgaggcctacgtgcccaagcagaacctgttcagagacaggagcggcgaggagcccgaggagatgcgcgcggcccggttccacgcggggcgggagctgcggcgcggcctggaccgaaagagggtgctgagggacgaggatttcgaggcggacgagctgacggggatcagccccgcgcgcgcgcacgtggccgcggccaacctggtcacggcgtacgagcagaccgtgaaggaggagagcaacttccaaaaatccttcaacaaccacgtgcgcaccctgatcgcgcgcgaggaggtgaccctgggcctgatgcacctgtgggacctgctggaggccatcgtgcagaaccccaccagcaagccgctgacggcgcagctgttcctggtggtgcagcatagtcgggacaacgaagcgttcagggaggcgctgctgaatatcaccgagcccgagggccgctggctcctggacctggtgaacattctgcagagcatcgtggtgcaggagcgcgggctgccgctgtccgagaagctggcggccatcaacttctcggtgctgagtttgggcaagtactacgctaggaagatctacaagaccccgtacgtgcccatagacaaggaggtgaagatcgacgggttttacatgcgcatgaccctgaaagtgctgaccctgagcgacgatctgggggtgtaccgcaacgacaggatgcaccgtgcggtgagcgccagcaggcggcgcgagctgagcgaccaggagctgatgcatagtctgcagcgggccctgaccggggccgggaccgagggggagagctactttgacatgggcgcggacctgcactggcagcccagccgccgggccttggaggcggcggcaggaccctacgtagaagaggtggacgatgaggtggacgaggagggcgagtacctggaagactgatggcgcgaccgtatttttgctagatgcaacaacaacagccacctcctgatcccgcgatgcgggcggcgctgcagagccagccgtccggcattaactcctcggacgattggacccaggccatgcaacgcatcatggcgctgacgacccgcaaccccgaagcctttagacagcagccccaggccaaccggctctcggccatcctggaggccgtggtgccctcgcgctccaaccccacgcacgagaaggtcctggccatcgtgaacgcgctggtggagaacaaggccatccgcggcgacgaggccggcctggtgtacaacgcgctgctggagcgcgtggcccgctacaacagcaccaacgtgcagaccaacctggaccgcatggtgaccgacgtgcgcgaggccgtggcccagcgcgagcggttccaccgcgagtccaacctgggatccatggtggcgctgaacgccttcctcagcacccagcccgccaacgtgccccggggccaggaggactacaccaacttcatcagcgccctgcgcctgatggtgaccgaggtgccccagagcgaggtgtaccagtccgggccggactacttcttccagaccagtcgccagggcttgcagaccgtgaacctgagccaggctttcaagaacttgcagggcctgtggggcgtgcaggccccggtcggggaccgcgcgacggtgtcgagcctgctgacgccgaactcgcgcctgctgctgctgctggtggcccccttcacggacagcggcagcatcaaccgcaactcgtacctgggctacctgattaacctgtaccgcgaggccatcggccaggcgcacgtggacgagcagacctaccaggagatcacccacgtgagccgcgccctgggccaggacgacccgggcaacctggaagccaccctgaactttttgctgaccaaccggtcgcagaagatcccgccccagtacgcgctcagcaccgaggaggagcgcatcctgcgttacgtgcagcagagcgtgggcctgttcctgatgcaggagggggccacccccagcgccgcgctcgacatgaccgcgcgcaacatggagcccagcatgtacgccagcaaccgcccgttcatcaataaactgatggactacttgcatcgggcggccgccatgaactctgactatttcaccaacgccatcctgaatccccactggctcccgccgccggggttctacacgggcgagtacgacatgcccgaccccaatgacgggttcctgtgggacgatgtggacagcagcgtgttctccccccgaccgggtgctaacgagcgccccttgtggaagaaggaaggcagcgaccgacgcccgtcctcggcgctgtccggccgcgagggtgctgccgcggcggtgcccgaggccgccagtcctttcccgagcttgcccttctcgctgaacagtatccgcagcagcgagctgggcaggatcacgcgcccgcgcttgctgggcgaagaggagtacttgaatgactcgctgttgagacccgagcgggagaagaacttccccaataacgggatagaaagcctggtggacaagatgagccgctggaagacgtatgcgcaggagcacagggacgatccccgggcgtcgcagggggccacgagccggggcagcgccgcccgtaaacgccggtggcacgacaggcagcggggacagatgtgggacgatgaggactccgccgacgacagcagcgtgttggacttgggtgggagtggtaacccgttcgctcacctgcgcccccgtatcgggcgcatgatgtaagagaaaccgaaaataaatgatactcaccaaggccatggcgaccagcgtgcgttcgtttcttctctgttgttgttgtatctagtatgatgaggcgtgcgtacccggagggtcctcctccctcgtacgagagcgtgatgcagcaggcgatggcggcggcggcgatgcagcccccgctggaggctccttacgtgcccccgcggtacctggcgcctacggaggggcggaacagcattcgttactcggagctggcacccttgtacgataccacccggttgtacctggtggacaacaagtcggcggacatcgcctcgctgaactaccagaacgaccacagcaacttcctgaccaccgtggtgcagaacaatgacttcacccccacggaggccagcacccagaccatcaactttgacgagcgctcgcggtggggcggccagctgaaaaccatcatgcacaccaacatgcccaacgtgaacgagttcatgtacagcaacaagttcaaggcgcgggtgatggtctcccgcaagacccccaatggggtgacagtgacagaggattatgatggtagtcaggatgagctgaagtatgaatgggtggaatttgagctgcccgaaggcaacttctcggtgaccatgaccatcgacctgatgaacaacgccatcatcgacaattacttggcggtggggcggcagaacggggtgctggagagcgacatcggcgtgaagttcgacactaggaacttcaggctgggctgggaccccgtgaccgagctggtcatgcccggggtgtacaccaacgaggctttccatcccgatattgtcttgctgcccggctgcggggtggacttcaccgagagccgcctcagcaacctgctgggcattcgcaagaggcagcccttccaggaaggcttccagatcatgtacgaggatctggaggggggcaacatccccgcgctcctggatgtcgacgcctatgagaaaagcaaggaggatgcagcagctgaagcaactgcagccgtagctaccgcctctaccgaggtcaggggcgataattttgcaagcgccgcagcagtggcagcggccgaggcggctgaaaccgaaagtaagatagtcattcagccggtggagaaggatagcaagaacaggagctacaacgtactaccggacaagataaacaccgcctaccgcagctggtacctagcctacaactatggcgaccccgagaagggcgtgcgctcctggacgctgctcaccacctcggacgtcacctgcggcgtggagcaagtctactggtcgctgcccgacatgatgcaagacccggtcaccttccgctccacgcgtcaagttagcaactacccggtggtgggcgccgagctcctgcccgtctactccaagagcttcttcaacgagcaggccgtctactcgcagcagctgcgcgccttcacctcgcttacgcacgtcttcaaccgcttccccgagaaccagatcctcgtccgcccgcccgcgcccaccattaccaccgtcagtgaaaacgttcctgctctcacagatcacgggaccctgccgctgcgcagcagtatccggggagtccagcgcgtgaccgttactgacgccagacgccgcacctgcccctacgtctacaaggccctgggcatagtcgcgccgcgcgtcctctcgagccgcaccttctaaatgtccattctcatctcgcccagtaataacaccggttggggcctgcgcgcgcccagcaagatgtacggaggcgctcgccaacgctccacgcaacaccccgtgcgcgtgcgcgggcacttccgcgctccctggggcgccctcaagggccgcgtgcggtcgcgcaccaccgtcgacgacgtgatcgaccaggtggtggccgacgcgcgcaactacacccccgccgccgcgcccgtctccaccgtggacgccgtcatcgacagcgtggtggccgacgcgcgccggtacgcccgcgccaagagccggcggcggcgcatcgcccggcggcaccggagcacccccgccatgcgcgcggcgcgagccttgctgcgcagggccaggcgcacgggacgcagggccatgctcagggcggccagacgcgcggcttcaggcgccagcgccggcaggacccggagacgcgcggccacggcggcggcagcggccatcgccagcatgtcccgcccgcggcgagggaacgtgtactgggtgcgcgacgccgccaccggtgtgcgcgtgcccgtgcgcacccgcccccctcgcacttgaagatgttcacttcgcgatgttgatgtgtcccagcggcgaggaggatgtccaagcgcaaattcaaggaagagatgctccaggtcatcgcgcctgagatctacggccctgcggtggtgaaggaggaaagaaagccccgcaaaatcaagcgggtcaaaaaggacaaaaaggaagaagaaagtgatgtggacggattggtggagtttgtgcgcgagttcgccccccggcggcgcgtgcagtggcgcgggcggaaggtgcaaccggtgctgagacccggcaccaccgtggtcttcacgcccggcgagcgctccggcaccgcttccaagcgctcctacgacgaggtgtacggggatgatgatattctggagcaggcggccgagcgcctgggcgagtttgcttacggcaagcgcagccgttccgcaccgaaggaagaggcggtgtccatcccgctggaccacggcaaccccacgccgagcctcaagcccgtgaccttgcagcaggtgctgccgaccgcggcgccgcgccgggggttcaagcgcgagggcgaggatctgtaccccaccatgcagctgatggtgcccaagcgccagaagctggaagacgtgctggagaccatgaaggtggacccggacgtgcagcccgaggtcaaggtgcggcccatcaagcaggtggccccgggcctgggcgtgcagaccgtggacatcaagattcccacggagcccatggaaacgcagaccgagcccatgatcaagcccagcaccagcaccatggaggtgcagacggatccctggatgccatcggctcctagtcgaagaccccggcgcaagtacggcgcggccagcctgctgatgcccaactacgcgctgcatccttccatcatccccacgccgggctaccgcggcacgcgcttctaccgcggtcataccagcagccgccgccgcaagaccaccactcgccgccgccgtcgccgcaccgccgctgcaaccacccctgccgccctggtgcggagagtgtaccgccgcggccgcgcacctctgaccctgccgcgcgcgcgctaccacccgagcatcgccatttaaactttcgcctgctttgcagatcaatggccctcacatgccgccttcgcgttcccattacgggctaccgaggaagaaaaccgcgccgtagaaggctggcggggaacgggatgcgtcgccaccaccaccggcggcggcgcgccatcagcaagcggttggggggaggcttcctgcccgcgctgatccccatcatcgccgcggcgatcggggcgatccccggcattgcttccgtggcggtgcaggcctctcagcgccactgagacacacttggaaacatcttgtaataaaccaatggactctgacgctcctggtcctgtgatgtgttttcgtagacagatggaagacatcaatttttcgtccctggctccgcgacacggcacgcggccgttcatgggcacctggagcgacatcggcaccagccaactgaacgggggcgccttcaattggagcagtctctggagcgggcttaagaatttcgggtccacgcttaaaacctatggcagcaaggcgtggaacagcaccacagggcaggcgctgagggataagctgaaagagcagaacttccagcagaaggtggtcgatgggctcgcctcgggcatcaacggggtggtggacctggccaaccaggccgtgcagcggcagatcaacagccgcctggacccggtgccgcccgccggctccgtggagatgccgcaggtggaggaggagctgcctcccctggacaagcggggcgagaagcgaccccgccccgatgcggaggagacgctgctgacgcacacggacgagccgcccccgtacgaggaggcggtgaaactgggtctgcccaccacgcggcccatcgcgcccctggccaccggggtgctgaaacccgaaaagcccgcgaccctggacttgcctcctccccagccttcccgcccctctacagtggctaagcccctgccgccggtggccgtggcccgcgcgcgacccgggggcaccgcccgccctcatgcgaactggcagagcactctgaacagcatcgtgggtctgggagtgcagagtgtgaagcgccgccgctgctattaaacctaccgtagcgcttaacttgcttgtctgtgtgtgtatgtattatgtcgccgccgccgctgtccaccagaaggaggagtgaagaggcgcgtcgccgagttgcaagatggccaccccatcgatgctgccccagtgggcgtacatgcacatcgccggacaggacgcttcggagtacctgagtccgggtctggtgcagtttgcccgcgccacagacacctacttcagtctggggaacaagtttaggaaccccacggtggcgcccacgcacgatgtgaccaccgaccgcagccagcggctgacgctgcgcttcgtgcccgtggaccgcgaggacaacacctactcgtacaaagtgcgctacacgctggccgtgggcgacaaccgcgtgctggacatggccagcacctactttgacatccgcggcgtgctggatcggggccctagcttcaaaccctactccggcaccgcctacaacagtctggcccccaagggagcacccaacacttgtcagtggacatataaagccgatggtgaaactgccacagaaaaaacctatacatatggaaatgcacccgtgcagggcattaacatcacaaaagatggtattcaacttggaactgacaccgatgatcagccaatctacgcagataaaacctatcagcctgaacctcaagtgggtgatgctgaatggcatgacatcactggtactgatgaaaagtatggaggcagagctcttaagcctgataccaaaatgaagccttgttatggttcttttgccaagcctactaataaagaaggaggtcaggcaaatgtgaaaacaggaacaggcactactaaagaatatgacatagacatggctttctttgacaacagaagtgcggctgctgctggcctagctccagaaattgttttgtatactgaaaatgtggatttggaaactccagatacccatattgtatacaaagcaggcacagatgacagcagctcttctattaatttgggtcagcaagccatgcccaacagacctaactacattggtttcagagacaactttatcgggctcatgtactacaacagcactggcaatatgggggtgctggccggtcaggcttctcagctgaatgctgtggttgacttgcaagacagaaacaccgagctgtcctaccagctcttgcttgactctctgggtgacagaacccggtatttcagtatgtggaatcaggcggtggacagctatgatcctgatgtgcgcattattgaaaatcatggtgtggaggatgaacttcccaactattgtttccctctggatgctgttggcagaacagatacttatcagggaattaaggctaatggaactgatcaaaccacatggaccaaagatgacagtgtcaatgatgctaatgagataggcaagggtaatccattcgccatggaaatcaacatccaagccaacctgtggaggaacttcctctacgccaacgtggccctgtacctgcccgactcttacaagtacacgccggccaatgttaccctgcccaccaacaccaacacctacgattacatgaacggccgggtggtggcgccctcgctggtggactcctacatcaacatcggggcgcgctggtcgctggatcccatggacaacgtgaaccccttcaaccaccaccgcaatgcggggctgcgctaccgctccatgctcctgggcaacgggcgctacgtgcccttccacatccaggtgccccagaaatttttcgccatcaagagcctcctgctcctgcccgggtcctacacctacgagtggaacttccgcaaggacgtcaacatgatcctgcagagctccctcggcaacgacctgcgcacggacggggcctccatctccttcaccagcatcaacctctacgccaccttcttccccatggcgcacaacacggcctccacgctcgaggccatgctgcgcaacgacaccaacgaccagtccttcaacgactacctctcggcggccaacatgctctaccccatcccggccaacgccaccaacgtgcccatctccatcccctcgcgcaactgggccgccttccgcggctggtccttcacgcgtctcaagaccaaggagacgccctcgctgggctccgggttcgacccctacttcgtctactcgggctccatcccctacctcgacggcaccttctacctcaaccacaccttcaagaaggtctccatcaccttcgactcctccgtcagctggcccggcaacgaccggctcctgacgcccaacgagttcgaaatcaagcgcaccgtcgacggcgagggctacaacgtggcccagtgcaacatgaccaaggactggttcctggtccagatgctggcccactacaacatcggctaccagggcttctacgtgcccgagggctacaaggaccgcatgtactccttcttccgcaacttccagcccatgagccgccaggtggtggacgaggtcaactacaaggactaccaggccgtcaccctggcctaccagcacaacaactcgggcttcgtcggctacctcgcgcccaccatgcgccagggccagccctaccccgccaactacccctacccgctcatcggcaagagcgccgtcaccagcgtcacccagaaaaagttcctctgcgacagggtcatgtggcgcatccccttctccagcaacttcatgtccatgggcgcgctcaccgacctcggccagaacatgctctatgccaactccgcccacgcgctagacatgaatttcgaagtcgaccccatggatgagtccacccttctctatgttgtcttcgaagtcttcgacgtcgtccgagtgcaccagccccaccgcggcgtcatcgaggccgtctacctgcgcacccccttctcggccggtaacgccaccacctaagctcttgcttcttgcaagccatggccgcgggctccggcgagcaggagctcagggccatcatccgcgacctgggctgcgggccctacttcctgggcaccttcgataagcgcttcccgggattcatggccccgcacaagctggcctgcgccatcgtcaacacggccggccgcgagaccgggggcgagcactggctggccttcgcctggaacccgcgctcgaacacctgctacctcttcgaccccttcgggttctcggacgagcgcctcaagcagatctaccagttcgagtacgagggcctgctgcgccgcagcgccctggccaccgaggaccgctgcgtcaccctggaaaagtccacccagaccgtgcagggtccgcgctcggccgcctgcgggctcttctgctgcatgttcctgcacgccttcgtgcactggcccgaccgccccatggacaagaaccccaccatgaacttgctgacgggggtgcccaacggcatgctccagtcgccccaggtggaacccaccctgcgccgcaaccaggaggcgctctaccgcttcctcaactcccactccgcctactttcgctcccaccgcgcgcgcatcgagaaggccaccgccttcgaccgcatgaatcaagacatgtaaaccgtgtgtgtatgttaaatgtctttaataaacagcactttcatgttacacatgcatctgagatgatttatttagaaatcgaaagggttctgccgggtctcggcatggcccgcgggcagggacacgttgcggaactggtacttggccagccacttgaactcggggatcagcagtttgggcagcggggtgtcggggaaggagtcggtccacagcttccgcgtcagttgcagggcgcccagcaggtcgggcgcggagatcttgaaatcgcagttgggacccgcgttctgcgcgcgggagttgcggtacacggggttgcagcactggaacaccatcagggccgggtgcttcacgctcgccagcaccgtcgcgtcggtgatgctctccacgtcgaggtcctcggcgttggccatcccgaagggggtcatcttgcaggtctgccttcccatggtgggcacgcacccgggcttgtggttgcaatcgcagtgcagggggatcagcatcatctgggcctggtcggcgttcatccccgggtacatggccttcatgaaagcctccaattgcctgaacgcctgctgggccttggctccctcggtgaagaagaccccgcaggacttgctagagaactggttggtggcgcacccggcgtcgtgcacgcagcagcgcgcgtcgttgttggccagctgcaccacgctgcgcccccagcggttctgggtgatcttggcccggtcggggttctccttcagcgcgcgctgcccgttctcgctcgccacatccatctcgatcatgtgctccttctggatcatggtggtcccgtgcaggcaccgcagcttgccctcggcctcggtgcacccgtgcagccacagcgcgcacccggtgcactcccagttcttgtgggcgatctgggaatgcgcgtgcacgaagccctgcaggaagcggcccatcatggtggtcagggtcttgttgctagtgaaggtcagcggaatgccgcggtgctcctcgttgatgtacaggtggcagatgcggcggtacacctcgccctgctcgggcatcagctggaagttggctttcaggtcggtctccacgcggtagcggtccatcagcatagtcatgatttccatacccttctcccaggccgagacgatgggcaggctcatagggttcttcaccatcatcttagcgctagcagccgcggccagggggtcgctctcgtccagggtctcaaagctccgcttgccgtccttctcggtgatccgcaccggggggtagctgaagcccacggccgccagctcctcctcggcctgtctttcgtcctcgctgtcctggctgacgtcctgcaggaccacatgcttggtcttgcggggtttcttcttgggcggcagcggcggcggagatgttggagatggcgagggggagcgcgagttctcgctcaccactactatctcttcctcttcttggtccgaggccacgcggcggtaggtatgtctcttcgggggcagaggcggaggcgacgggctctcgccgccgcgacttggcggatggctggcagagccccttccgcgttcgggggtgcgctcccggcggcgctctgactgacttcctccgcggccggccattgtgttctcctagggaggaacaacaagcatggagactcagccatcgccaacctcgccatctgcccccaccgccgacgagaagcagcagcagcagaatgaaagcttaaccgccccgccgcccagccccgccacctccgacgcggccgtcccagacatgcaagagatggaggaatccatcgagattgacctgggctatgtgacgcccgcggagcacgaggaggagctggcagtgcgcttttcacaagaagagatacaccaagaacagccagagcaggaagcagagaatgagcagagtcaggctgggctcgagcatgacggcgactacctccacctgagcgggggggaggacgcgctcatcaagcatctggcccggcaggccaccatcgtcaaggatgcgctgctcgaccgcaccgaggtgcccctcagcgtggaggagctcagccgcgcctacgagttgaacctcttctcgccgcgcgtgccccccaagcgccagcccaatggcacctgcgagcccaacccgcgcctcaacttctacccggtcttcgcggtgcccgaggccctggccacctaccacatctttttcaagaaccaaaagatccccgtctcctgccgcgccaaccgcacccgcgccgacgcccttttcaacctgggtcccggcgcccgcctacctgatatcgcctccttggaagaggttcccaagatcttcgagggtctgggcagcgacgagactcgggccgcgaacgctctgcaaggagaaggaggagagcatgagcaccacagcgccctggtcgagttggaaggcgacaacgcgcggctggcggtgctcaaacgcacggtcgagctgacccatttcgcctacccggctctgaacctgccccccaaagtcatgagcgcggtcatggaccaggtgctcatcaagcgcgcgtcgcccatctccgaggacgagggcatgcaagactccgaggagggcaagcccgtggtcagcgacgagcagctggcccggtggctgggtcctaatgctagtccccagagtttggaagagcggcgcaaactcatgatggccgtggtcctggtgaccgtggagctggagtgcctgcgccgcttcttcgccgacgcggagaccctgcgcaaggtcgaggagaacctgcactacctcttcaggcacgggttcgtgcgccaggcctgcaagatctccaacgtggagctgaccaacctggtctcctacatgggcatcttgcacgagaaccgcctggggcagaacgtgctgcacaccaccctgcgcggggaggcccggcgcgactacatccgcgactgcgtctacctctacctctgccacacctggcagacgggcatgggcgtgtggcagcagtgtctggaggagcagaacctgaaagagctctgcaagctcctgcagaagaacctcaagggtctgtggaccgggttcgacgagcgcaccaccgcctcggacctggccgacctcattttccccgagcgcctcaggctgacgctgcgcaacggcctgcccgactttatgagccaaagcatgttgcaaaactttcgctctttcatcctcgaacgctccggaatcctgcccgccacctgctccgcgctgccctcggacttcgtgccgctgaccttccgcgagtgccccccgccgctgtggagccactgctacctgctgcgcctggccaactacctggcctaccactcggacgtgatcgaggacgtcagcggcgagggcctgctcgagtgccactgccgctgcaacctctgcacgccgcaccgctccctggcctgcaacccccagctgctgagcgagacccagatcatcggcaccttcgagttgcaagggcccagcgaaggcgagggttcagccgccaaggggggtctgaaactcaccccggggctgtggacctcggcctacttgcgcaagttcgtgcccgaggactaccatcccttcgagatcaggttctacgaggaccaatcccatccgcccaaggccgagctgtcggcctgcgtcatcacccagggggcgatcctggcccaattgcaagccatccagaaatcccgccaagaattcttgctgaaaaagggccgcggggtctacctcgacccccagaccggtgaggagctcaaccccggcttcccccaggatgccccgaggaaacaagaagctgaaagtggagctgccgcccgtggaggatttggaggaagactgggagaacagcagtcaggcagaggaggaggagatggaggaagactgggacagcactcaggcagaggaggacagcctgcaagacagtctggaggaagacgaggaggaggcagaggaggaggtggaagaagcagccgccgccagaccgtcgtcctcggcgggggagaaagcaagcagcacggataccatctccgctccgggtcggggtcccgctcgaccacacagtagatgggacgagaccggacgattcccgaaccccaccacccagaccggtaagaaggagcggcagggatacaagtcctggcgggggcacaaaaacgccatcgtctcctgcttgcaggcctgcgggggcaacatctccttcacccggcgctacctgctcttccaccgcggggtgaactttccccgcaacatcttgcattactaccgtcacctccacagcccctactacttccaagaagaggcagcagcagcagaaaaagaccagcagaaaaccagcagctagaaaatccacagcggcggcagcaggtggactgaggatcgcggcgaacgagccggcgcaaacccgggagctgaggaaccggatctttcccaccctctatgccatcttccagcagagtcgggggcaggagcaggaactgaaagtcaagaaccgttctctgcgctcgctcacccgcagttgtctgtatcacaagagcgaagaccaacttcagcgcactctcgaggacgccgaggctctcttcaacaagtactgcgcgctcactcttaaagagtagcccgcgcccgcccagtcgcagaaaaaggcgggaattacgtcacctgtgcccttcgccctagccgcctccacccatcatcatgagcaaagagattcccacgccttacatgtggagctaccagccccagatgggcctggccgccggtgccgcccaggactactccacccgcatgaattggctcagcgccgggcccgcgatgatctcacgggtgaatgacatccgcgcccaccgaaaccagatactcctagaacagtcagcgctcaccgccacgccccgcaatcacctcaatccgcgtaattggcccgccgccctggtgtaccaggaaattccccagcccacgaccgtactacttccgcgagacgcccaggccgaagtccagctgactaactcaggtgtccagctggcgggcggcgccaccctgtgtcgtcaccgccccgctcagggtataaagcggctggtgatccggggcagaggcacacagctcaacgacgaggtggtgagctcttcgctgggtctgcgacctgacggagtcttccaactcgccggatcggggagatcttccttcacgcctcgtcaggccgtcctgactttggagagttcgtcctcgcagccccgctcgggtggcatcggcactctccagttcgtggaggagttcactccctcggtctacttcaaccccttctccggctcccccggccactacccggacgagttcatcccgaacttcgacgccatcagcgagtcggtggacggctacgattgaaactaatcacccccttatccagtgaaataaagatcatattgatgatgattttacagaaataaaaaataatcatttgatttgaaataaagatacaatcatattgatgatttgagtttaacaaaaaaataaagaatcacttacttgaaatctgataccaggtctctgtccatgttttctgccaacaccacttcactcccctcttcccagctctggtactgcaggccccggcgggctgcaaacttcctccacacgctgaaggggatgtcaaattcctcctgtccctcaatcttcattttatcttctatcagatgtccaaaaagcgcgtccgggtggatgatgacttcgaccccgtctacccctacgatgcagacaacgcaccgaccgtgcccttcatcaacccccccttcgtctcttcagatggattccaagagaagcccctgggggtgttgtccctgcgactggccgaccccgtcaccaccaagaacggggaaatcaccctcaagctgggagagggggtggacctcgattcctcgggaaaactcatctccaacacggccaccaaggccgccgcccctctcagtttttccaacaacaccatttcccttaacatggatcaccccttttacactaaagatggaaaattatccttacaagtttctccaccattaaatatactgagaacaagcattctaaacacactagctttaggttttggatcaggtttaggactccgtggctctgccttggcagtacagttagtctctccacttacatttgatactgatggaaacataaagcttaccttagacagaggtttgcatgttacaacaggagatgcaattgaaagcaacataagctgggctaaaggtttaaaatttgaagatggagccatagcaaccaacattggaaatgggttagagtttggaagcagtagtacagaaacaggtgttgatgatgcttacccaatccaagttaaacttggatctggccttagctttgacagtacaggagccataatggctggtaacaaagaagacgataaactcactttgtggacaacacctgatccatcaccaaactgtcaaatactcgcagaaaatgatgcaaaactaacactttgcttgactaaatgtggtagtcaaatactggccactgtgtcagtcttagttgtaggaagtggaaacctaaaccccattactggcaccgtaagcagtgctcaggtgtttctacgttttgatgcaaacggtgttcttttaacagaacattctacactaaaaaaatactgggggtataggcagggagatagcatagatggcactccatataccaatgctgtaggattcatgcccaatttaaaagcttatccaaagtcacaaagttctactactaaaaataatatagtagggcaagtatacatgaatggagatgtttcaaaacctatgcttctcactataaccctcaatggtactgatgacagcaacagtacatattcaatgtcattttcatacacctggactaatggaagctatgttggagcaacatttggggctaactcttataccttctcatacatcgcccaagaatgaacactgtatcccaccctgcatgccaacccttcccaccccactctgtggaacaaactctgaaacacaaaataaaataaagttcaagtgttttattgattcaacagttttacaggattcgagcagttatttttcctccaccctcccaggacatggaatacaccaccctctccccccgcacagccttgaacatctgaatgccattggtgatggacatgcttttggtctccacgttccacacagtttcagagcgagccagtctcgggtcggtcagggagatgaaaccctccgggcactcccgcatctgcacctcacagctcaacagctgaggattgtcctcggtggtcgggatcacggttatctggaagaagcagaagagcggcggtgggaatcatagtccgcgaacgggatcggccggtggtgtcgcatcaggccccgcagcagtcgctgccgccgccgctccgtcaagctgctgctcagggggtccgggtccagggactccctcagcatgatgcccacggccctcagcatcagtcgtctggtgcggcgggcgcagcagcgcatgcggatctcgctcaggtcgctgcagtacgtgcaacacagaaccaccaggttgttcaacagtccatagttcaacacgctccagccgaaactcatcgcgggaaggatgctacccacgtggccgtcgtaccagatcctcaggtaaatcaagtggtgccccctccagaacacgctgcccacgtacatgatctccttgggcatgtggcggttcaccacctcccggtaccacatcaccctctggttgaacatgcagccccggatgatcctgcggaaccacagggccagcaccgccccgcccgccatgcagcgaagagaccccgggtcccggcaatggcaatggaggacccaccgctcgtacccgtggatcatctgggagctgaacaagtctatgttggcacagcacaggcatatgctcatgcatctcttcagcactctcaactcctcgggggtcaaaaccatatcccagggcacggggaactcttgcaggacagcgaaccccgcagaacagggcaatcctcgcacagaacttacattgtgcatggacagggtatcgcaatcaggcagcaccgggtgatcctccaccagagaagcgcgggtctcggtctcctcacagcgtggtaagggggccggccgatacgggtgatggcgggacgcggctgatcgtgttcgcgaccgtgtcatgatgcagttgctttcggacattttcgtacttgctgtagcagaacctggtccgggcgctgcacaccgatcgccggcggcggtctcggcgcttggaacgctcggtgttgaaattgtaaaacagccactctctcagaccgtgcagcagatctagggcctcaggagtgatgaagatcccatcatgcctgatggctctgatcacatcgaccaccgtggaatgggccagacccagccagatgatgcaattttgttgggtttcggtgacggcgggggagggaagaacaggaagaaccatgattaacttttaatccaaacggtctcggagtacttcaaaatgaagatcgcggagatggcacctctcgcccccgctgtgttggtggaaaataacagccaggtcaaaggtgatacggttctcgagatgttccacggtggcttccagcaaagcctccacgcgcacatccagaaacaagacaatagcgaaagcgggagggttctctaattcctcaatcatcatgttacactcctgcaccatccccagataattttcatttttccagccttgaatgattcgaactagttcctgaggtaaatccaagccagccatgataaagagctcgcgcagagcgccctccaccggcattcttaagcacaccctcataattccaagatattctgctcctggttcacctgcagcagattgacaagcggaatatcaaaatctctgccgcgatccctgagctcctccctcagcaataactgtaagtactctttcatatcctctccgaaatttttagccataggaccaccaggaataagattagggcaagccacagtacagataaaccgaagtcctccccagtgagcattgccaaatgcaagactgctataagcatgctggctagacccggtgatatcttccagataactggacagaaaatcgcccaggcaatttttaagaaaatcaacaaaagaaaaatcctccaggtggacgtttagagcctcgggaacaacgatgaagtaaatgcaagcggtgcgttccagcatggttagttagctgatctgtagaaaaaacaaaaatgaacattaaaccatgctagcctggcgaacaggtgggtaaatcgttctctccagcaccaggcaggccacggggtctccggcgcgaccctcgtaaaaattgtcgctatgattgaaaaccatcacagagagacgttcccggtggccggcgtgaatgattcgacaagatgaatacacccccggaacattggcgtccgcgagtgaaaaaaagcgcccgaggaagcaataaggcactacaatgctcagtctcaagtccagcaaagcgatgccatgcggatgaagcacaaaattctcaggtgcgtacaaaatgtaattactcccctcctgcacaggcagcaaagcccccgatccctccaggtacacatacaaagcctcagcgtccatagcttaccgagcagcagcacacaacaggcgcaagagtcagagaaaggctgagctctaacctgtccacccgctctctgctcaatatatagcccagatctacactgacgtaaaggccaaagtctaaaaatacccgccaaataatcacacacgcccagcacacgcccagaaaccggtgacacactcaaaaaaatacgcgcacttcctcaaacgcccaaaactgccgtcatttccgggttcccacgctacgtcatcaaaacacgactttcaaattccgtcgaccgttaaaaacgtcacccgccccgcccctaacggtcgcccgtctctcagccaatcagcgccccgcatccccaaattcaaacacctcatttgcatattaacgcgcacaaaaagtttgaggtatattattgatgatggttaattaa

SEQ ID NO: 73 - DNA, 2184 bp, Artificial Sequence
  Description of Artificial Sequence: Synthetic polynucleotide
atggagttcggcctctcttgggttttcttggtcgctttgcttagaggggtacaatgtcaagtccaattggttgagtctggtggtggtgtagttcaaccaggacggtcacttcggctctcctgtgccgcatccgggttcactttcagttcttacacaatgcactgggttagacaagcccctggtaagggtttggagtgggtaacgttcatctcctacgacgggaataataagtactacgccgactcagtcaaggggcgattcacgatatcccgagacaattcaaagaatacactctatctccaaatgaattcactccgggctgaggacactgcaatctactactgtgcacggacaggttggttgggacccttcgactactggggtcaaggaacactcgtaacagtctcatccgcctctacaaagggtccatctgtattcccattggcaccttcctctaagagtacatcaggcgggacagctgctcttggttgtttggtcaaggactacttccctgagcctgtaactgtatcttggaattctggtgcactcacttctggagtacacactttccccgccgtcttgcaatcatccgggctctactcactctcttcagtagtaacggtaccatcaagtagtctcggaactcaaacgtacatctgtaatgttaatcacaagccttctaatactaaggtcgacaagagagtcgagcccaagagttgtgacaagacacacacttgtccaccttgtcccgcccctgagttgctcggtggaccatcagtcttcttgtttcccccaaagccaaaggacacactcatgatctcccgtactccagaggttacttgtgtcgtcgtcgacgtctcccacgaggaccctgaggttaagttcaattggtacgtcgacggtgtcgaggtccacaatgcaaagacaaagcctagggaagagcaatacaattccacgtaccgggtagtctccgttctcacagttctccaccaagactggttgaatggaaaggagtacaagtgtaaggtcagtaataaggcccttcccgcccctatcgagaagacaatctccaaggctaaggggcaacctagagagccccaagtatacacattgcccccaagtcgggacgagctcacaaagaatcaagtttccttgacatgtcttgttaaggggttctacccatcagacatcgcagttgagtgggagtccaatgggcaacctgagaataattacaagactacaccacccgtccttgacagtgacggttcattcttcctctacagtaagttgacggttgacaagagtcggtggcaacaaggaaatgtcttctcctgttcagtaatgcacgaggctctccacaatcactacactcaaaagtccttgtccctttctcccggtaagcggaagagacgaggggtcagggccgaggggcggggttctcttctcacatgtggagacgtcgaggagaatcctggtcctatggagactcccgcccaattgttgttcttgctcctcttgtggcttcccgacacaactggggagatcgtcctcacacaatctcccgggacgctttcactctctccaggagagcgggccacgctcagttgtagagcaagtcaaagtgtcgggtcatcatacttggcctggtaccaacaaaagccagggcaagcccccagacttttgatctacggggccttctcccgagccacaggtatacccgaccggttctccggatccggttcaggaacggacttcacactcactatctcaagattggagcccgaggacttcgccgtatactactgtcaacaatacggttccagtccctggacgttcggtcaagggacaaaggttgagataaagcggacagtcgccgctccgtccgtcttcatcttcccaccttccgacgagcaactcaagtctggaacagcttctgtcgtttgtctcctcaataatttctacccccgcgaggcaaaggttcaatggaaggtagacaatgctctccaaagtgggaatagtcaagagtctgttacagagcaagacagtaaggactctacatacagtttgtcatctacacttacactttctaaggccgactacgagaagcacaaggtatacgcctgtgaggtcactcaccaaggattgtcaagtccagtcacgaagtcattcaatcgaggagagtgt

SEQ ID NO: 74 - protein, 109 aa, Artificial Sequence
  Description of Artificial Sequence: Synthetic polypeptide
EIVLTQSPGTLSLSPGERATLSCRASQSVGSSYLAWYQQKPGQAPRLLIYGAFSRATGIPDRFSGSGSGTDFTLTISRLEPEDFAVYYCQQYGSSPWTFGQGTKVEIKR

SEQ ID NO: 75 - protein, 115 aa, Artificial Sequence
  Description of Artificial Sequence: Synthetic polypeptide
QVQLVESGGGVVQPGRSLRLSCAASGFTFSSYTMHWVRQAPGKGLEWVTFISYDGNNKYYADSVKGRFTISRDNSKNTLYLQMNSLRAEDTAIYYCARTGWLGPFDYWGQGTLVT

SEQ ID NO: 76 - protein, 8 aa, Artificial Sequence
  Description of Artificial Sequence: Synthetic peptide
QSVGSSYL

SEQ ID NO: 77 - protein, 4 aa, Artificial Sequence
  Description of Artificial Sequence: Synthetic peptide
GAFS

SEQ ID NO: 78 - protein, 9 aa, Artificial Sequence
  Description of Artificial Sequence: Synthetic peptide
QQYGSSPWT

SEQ ID NO: 79 - protein, 7 aa, Artificial Sequence
  Description of Artificial Sequence: Synthetic peptide
SVGSSYL

SEQ ID NO: 80 - protein, 4 aa, Artificial Sequence
  Description of Artificial Sequence: Synthetic peptide
GAFS

SEQ ID NO: 81 - protein, 9 aa, Artificial Sequence
  Description of Artificial Sequence: Synthetic peptide
QQYGSSPWT

SEQ ID NO: 82 - DNA, 2199 bp, Artificial Sequence
  Description of Artificial Sequence: Synthetic polynucleotide
atgggctggtcctgcatcatcctgtttctggtggctacagccacaggcgtgcactctcaggtgcaactggttgaatctggtggcggagtggtgcagcctggcagatctctgagactgtcttgtgctgccagcggcttcaccttcagcagctatggcatgcactgggttcgacaggcccctggcaaaggactggaatgggttgccgtgatttggtacgacggcagcaacaagtactacgccgacagcgtgaagggcagattcaccatctccagagacaacagcaagaacaccctgtacctgcagatgaacagcctgagagccgaggacaccgccgtgtactattgcgctagagatcctagaggcgccacactgtactactactattacggcatggacgtgtggggccagggcaccacagttacagtgtctagcgcctctacaaagggcccctccgtttttcctctggctccttgttctagaagcaccagcgagtctacagccgctctgggctgtctggtcaaggactactttcctgagcctgtgaccgtgtcctggaattctggtgctctgacaagcggcgtgcacacctttccagccgtgctgcaaagcagcggcctgtactctctgtctagcgtggtcaccgtgcctagcagcaatttcggcacccagacctacacctgtaacgtggaccacaagcctagcaacaccaaggtggacaagaccgtggaacggaagtgctgcgtggaatgccctccttgtcctgctcctccagtggccggaccttccgtgtttctgttccctccaaagcctaaggacaccctgatgatcagcagaacccctgaagtgacctgcgtggtggtggatgtgtctcacgaggatcccgaggtgcagttcaattggtacgtggacggcgtggaagtgcacaacgccaagaccaagcctagagaggaacagttcaactccaccttcagagtggtgtccgtgctgaccgtggtgcatcaggactggctgaacggcaaagagtacaagtgcaaggtgtccaacaagggcctgcctgctcctatcgagaaaaccatcagcaagaccaaaggccagcctcgcgagcctcaggtttacacactgcctccaagccgggaagagatgaccaagaatcaggtgtccctgacctgcctggttaagggcttctaccccagcgacatctccgtggaatgggagtctaatggccagccagagaacaactacaagaccacacctcctatgctggactccgatggctcattcttcctgtacagcaagctgacagtggacaagtccagatggcagcagggcaacgtgttcagctgttctgtgatgcacgaggccctgcacaaccactacacccagaagtctctgtctctgagccccggcaaacggaagagaagaggcgttagagccgaaggcagaggctctctgctgacatgcggagatgtggaagagaaccccggacctatggacatgagagtgcctgctcaactgctgggactgctgcttctttggctgcctggcgctagatgcgacatccagatgacacagagccctagcagcctgtctgcctctgtgggcgatagagtgaccatcacctgtcgggcctctcagagcatcaacagctacctggactggtatcagcaaaagcccggcaaggcccctaagctgctgatctatgccgctagctctctgcagtctggcgtgccaagcagattttctggcagcggctctggcaccgacttcaccctgacaatttctagcctgcagcctgaggacttcgccacctactactgccagcagtactacagcacccctttcacattcggccctggcacaaaggtggaaatcaagagaacagtggccgctccgagcgtgttcatctttccacctagcgacgagcagctgaaaagcggcacagcctctgtcgtgtgcctgctgaacaacttctaccctcgggaagccaaggtgcagtggaaagtggataatgccctgcagagcggcaacagccaagagagcgtgacagagcaggatagcaaggacagcacctatagcctgagcagcacactgaccctgagcaaggccgactacgagaagcacaaggtgtacgcctgcgaagtgacacaccagggactgagcagccctgtgaccaagagcttcaacagaggcgagtgctga

SEQ ID NO: 83 - protein, 8 aa, Artificial Sequence
  Description of Artificial Sequence: Synthetic peptide
SIINFEKL

SEQ ID NO: 84 - protein, 9 aa, Artificial Sequence
  Description of Artificial Sequence: Synthetic peptide
SPSYAYHQF

SEQ ID NO: 85 - protein, 10 aa, Artificial Sequence
  Description of Artificial Sequence: Synthetic peptide
YVYVADVAAK

SEQ ID NO: 86 - protein, 9 aa, Artificial Sequence
  Description of Artificial Sequence: Synthetic peptide
NLVPMVATV

SEQ ID NO: 87 - protein, 9 aa, Artificial Sequence
  Description of Artificial Sequence: Synthetic peptide
CLGGLLTMV

SEQ ID NO: 88 - protein, 9 aa, Artificial Sequence
  Description of Artificial Sequence: Synthetic peptide
GILGFVFTL

SEQ ID NO: 89 - protein, 9 aa, Artificial Sequence
  Description of Artificial Sequence: Synthetic peptide
LLFGYPVYV

SEQ ID NO: 90 - protein, 9 aa, Artificial Sequence
  Description of Artificial Sequence: Synthetic peptide
GLCTLVAML

SEQ ID NO: 91 - protein, 9 aa, Artificial Sequence
  Description of Artificial Sequence: Synthetic peptide
WLSLLVPFV

SEQ ID NO: 92 - protein, 8 aa, Artificial Sequence
  Description of Artificial Sequence: Synthetic peptide
FLLTRICT

SEQ ID NO: 93 - protein, 8 aa, Artificial Sequence
  Description of Artificial Sequence: Synthetic peptide
WQAGILAR

SEQ ID NO: 94 - protein, 8 aa, Artificial Sequence
  Description of Artificial Sequence: Synthetic peptide
QGQNLKYQ

SEQ ID NO: 95 - protein, 25 aa, Artificial Sequence
  Description of Artificial Sequence: Synthetic peptide
WQAGILARNLVPMVATVQGQNLKYQ

SEQ ID NO: 96 - protein, 8 aa, Artificial Sequence
  Description of Artificial Sequence: Synthetic peptide
SINNFEKL

SEQ ID NO: 97 - DNA, 20 bp, Artificial Sequence
  Description of Artificial Sequence: Synthetic primer
gtggtgtgcagcgagaatag

SEQ ID NO: 98 - DNA, 22 bp, Artificial Sequence
  Description of Artificial Sequence: Synthetic primer
cgctcgttgtagatgtcgttag

SEQ ID NO: 99 - DNA, 15 bp, Artificial Sequence
  Description of Artificial Sequence: Synthetic probe
ttcatgcccgtgttg

SEQ ID NO: 100 - DNA, 22 bp, Artificial Sequence
  Description of Artificial Sequence: Synthetic primer
gtttttgatccagacccagatg

SEQ ID NO: 101 - DNA, 21 bp, Artificial Sequence
  Description of Artificial Sequence: Synthetic primer
gcccattattcagagcgagta

SEQ ID NO: 102 - DNA, 14 bp, Artificial Sequence
  Description of Artificial Sequence: Synthetic probe
tcaccaggatccac

SEQ ID NO: 103 - DNA, 17 bp, Artificial Sequence
  Description of Artificial Sequence: Synthetic primer
ccttgcacatgccggag

SEQ ID NO: 104 - DNA, 17 bp, Artificial Sequence
  Description of Artificial Sequence: Synthetic primer
acagagcctcgcctttg

SEQ ID NO: 105 - DNA, 12 bp, Artificial Sequence
  Description of Artificial Sequence: Synthetic probe
gtgagctggcgg

SEQ ID NO: 106 - DNA, 22 bp, Artificial Sequence
  Description of Artificial Sequence: Synthetic primer
ctgaaagctcggtttgctaatg

SEQ ID NO: 107 - DNA, 21 bp, Artificial Sequence
  Description of Artificial Sequence: Synthetic primer
ccatgctggaagagacaatct

SEQ ID NO: 108 - DNA, 15 bp, Artificial Sequence
  Description of Artificial Sequence: Synthetic probe
tggcgctgaccgata

SEQ ID NO: 109 - DNA, 22 bp, Artificial Sequence
  Description of Artificial Sequence: Synthetic primer
tatgcctatcctgtctcctctg

SEQ ID NO: 110 - DNA, 22 bp, Artificial Sequence
  Description of Artificial Sequence: Synthetic primer
gctaatgcagctaagtcctctc

SEQ ID NO: 111 - DNA, 15 bp, Artificial Sequence
  Description of Artificial Sequence: Synthetic probe
tgaccgtgccttctg

SEQ ID NO: 112 - protein, 9 aa, Artificial Sequence
  Description of Artificial Sequence: Synthetic peptide
SPSYVYHQF

SEQ ID NO: 113 - protein, 10 aa, Artificial Sequence
  Description of Artificial Sequence: Synthetic peptide
  MISC_FEATURE (1)..(10): This sequence may encompass 2-10 residues
  See specification as filed for detailed description of substitutions and preferred embodiments
GGGGGGGGGG

SEQ ID NO: 114 - protein, 10 aa, Artificial Sequence
  Description of Artificial Sequence: Synthetic peptide
  MISC_FEATURE (1)..(10): This sequence may encompass 2-10 residues
  See specification as filed for detailed description of substitutions and preferred embodiments
AAAAAAAAAA

SEQ ID NO: 115 - protein, 9 aa, Artificial Sequence
  Description of Artificial Sequence: Synthetic peptide
NTDNNLAVY

SEQ ID NO: 116 - protein, 9 aa, Artificial Sequence
  Description of Artificial Sequence: Synthetic peptide
EVDPIGHVY

SEQ ID NO: 117 - protein, 9 aa, Artificial Sequence
  Description of Artificial Sequence: Synthetic peptide
LLASSILCA

SEQ ID NO: 118 - protein, 10 aa, Artificial Sequence
  Description of Artificial Sequence: Synthetic peptide
AIFPGAVPAA

SEQ ID NO: 119 - protein, 9 aa, Artificial Sequence
  Description of Artificial Sequence: Synthetic peptide
VYDLSRDIL

SEQ ID NO: 120 - protein, 10 aa, Artificial Sequence
  Description of Artificial Sequence: Synthetic peptide
ASSLPTTMNY

SEQ ID NO: 121 - protein, 13 aa, Artificial Sequence
  Description of Artificial Sequence: Synthetic peptide
PKYVKQNTLKLAT

SEQ ID NO: 122 - protein, 14 aa, Artificial Sequence
  Description of Artificial Sequence: Synthetic peptide
LPLKMLNIPSINVH

SEQ ID NO: 123 - protein, 15 aa, Artificial Sequence
  Description of Artificial Sequence: Synthetic peptide
PEQWMFQGAPPSQGT

SEQ ID NO: 124 - protein, 15 aa, Artificial Sequence
  Description of Artificial Sequence: Synthetic peptide
EHPTFTSQYRIQGKL

SEQ ID NO: 125 - protein, 25 aa, Artificial Sequence
  Description of Artificial Sequence: Synthetic peptide
PILSPLTKGILGFVFTLTVPSERGL

SEQ ID NO: 126 - protein, 25 aa, Artificial Sequence
  Description of Artificial Sequence: Synthetic peptide
HFPGFGQSLLFGYPVYVFGDCVQGD

SEQ ID NO: 127 - protein, 25 aa, Artificial Sequence
  Description of Artificial Sequence: Synthetic peptide
RMQAIQNAGLCTLVAMLEETIFWLQ

SEQ ID NO: 128 - protein, 25 aa, Artificial Sequence
  Description of Artificial Sequence: Synthetic peptide
RTYGPVFMCLGGLLTMVAGAVWLTV

SEQ ID NO: 129 - protein, 25 aa, Artificial Sequence
  Description of Artificial Sequence: Synthetic peptide
SSSGLINSNTDNNLAVYDLSRDILN

SEQ ID NO: 130 - protein, 25 aa, Artificial Sequence
  Description of Artificial Sequence: Synthetic peptide
LVFGIELMEVDPIGHVYIFATCLGL

SEQ ID NO: 131 - protein, 25 aa, Artificial Sequence
  Description of Artificial Sequence: Synthetic peptide
MNFYLLLASSILCALIVFWKYRRFQ

SEQ ID NO: 132 - protein, 25 aa, Artificial Sequence
  Description of Artificial Sequence: Synthetic peptide
AAAAAAAAIFPGAVPAARPPYPGAV

SEQ ID NO: 133 - protein, 25 aa, Artificial Sequence
  Description of Artificial Sequence: Synthetic peptide
SNTDNNLAVYDLSRDILNNFPHSIA

SEQ ID NO: 134 - protein, 25 aa, Artificial Sequence
  Description of Artificial Sequence: Synthetic peptide
DPPQSPQGASSLPTTMNYPLWSQSY

SEQ ID NO: 135 - protein, 25 aa, Artificial Sequence
  Description of Artificial Sequence: Synthetic peptide
ITYGACPKYVKQNTLKLATGMRNVP

SEQ ID NO: 136 - protein, 25 aa, Artificial Sequence
  Description of Artificial Sequence: Synthetic peptide
SIYVYALPLKMLNIPSINVHHYPSA

SEQ ID NO: 137 - protein, 25 aa, Artificial Sequence
  Description of Artificial Sequence: Synthetic peptide
EGPWVPEQWMFQGAPPSQGTDVVQH

SEQ ID NO: 138 - protein, 25 aa, Artificial Sequence
  Description of Artificial Sequence: Synthetic peptide
RGPQYSEHPTFTSQYRIQGKLEYRH

SEQ ID NO: 139 - protein, 9 aa, Artificial Sequence
  Description of Artificial Sequence: Synthetic peptide
CTPYDINQM

SEQ ID NO: 140 - protein, 8 aa, Artificial Sequence
  Description of Artificial Sequence: Synthetic peptide
TTPESANL

SEQ ID NO: 141 - protein, 9 aa, Artificial Sequence
  Description of Artificial Sequence: Synthetic peptide
CAPPGYALL

SEQ ID NO: 142 - protein, 9 aa, Artificial Sequence
  Description of Artificial Sequence: Synthetic peptide
SGPKTNIIV

SEQ ID NO: 143 - protein, 9 aa, Artificial Sequence
  Description of Artificial Sequence: Synthetic peptide
LSPRTLNAW

SEQ ID NO: 144 - protein, 9 aa, Artificial Sequence
  Description of Artificial Sequence: Synthetic peptide
TVPWPNASL

SEQ ID NO: 145 - protein, 15 aa, Artificial Sequence
  Description of Artificial Sequence: Synthetic peptide
PNGTHSWEYWGAQLN

SEQ ID NO: 146 - protein, 13 aa, Artificial Sequence
  Description of Artificial Sequence: Synthetic peptide
YKYKVVKIEPLGV

SEQ ID NO: 147 - protein, 15 aa, Artificial Sequence
  Description of Artificial Sequence: Synthetic peptide
TEEAKQIVQRHLVVE

SEQ ID NO: 148 - protein, 13 aa, Artificial Sequence
  Description of Artificial Sequence: Synthetic peptide
AGSLQGQWRGAAG

SEQ ID NO: 149 - protein, 16 aa, Artificial Sequence
  Description of Artificial Sequence: Synthetic peptide
EISTNIRQAGVQYSRA

SEQ ID NO: 150 - protein, 9 aa, Artificial Sequence
  Description of Artificial Sequence: Synthetic peptide
RPKQAWCWF

SEQ ID NO: 151 - protein, 9 aa, Artificial Sequence
  Description of Artificial Sequence: Synthetic peptide
RPKVPLRTM

SEQ ID NO: 152 - protein, 9 aa, Artificial Sequence
  Description of Artificial Sequence: Synthetic peptide
GPRKPIKCW

SEQ ID NO: 153 - protein, 9 aa, Artificial Sequence
  Description of Artificial Sequence: Synthetic peptide
LNMADKKET

SEQ ID NO: 154 - protein, 25 aa, Artificial Sequence
  Description of Artificial Sequence: Synthetic peptide
MFQALSEGCTPYDINQMLNVLGDHQ

SEQ ID NO: 155 - protein, 25 aa, Artificial Sequence
  Description of Artificial Sequence: Synthetic peptide
SCISEADATTPESANLGEEILSQLY

SEQ ID NO: 156 - protein, 25 aa, Artificial Sequence
  Description of Artificial Sequence: Synthetic peptide
WDAIRFRYCAPPGYALLRCNDTNYS

SEQ ID NO: 157 - protein, 25 aa, Artificial Sequence
  Description of Artificial Sequence: Synthetic peptide
AFLMALTDSGPKTNIIVDSQYVMGI

SEQ ID NO: 158 - protein, 25 aa, Artificial Sequence
  Description of Artificial Sequence: Synthetic peptide
GNVWVHTPLSPRTLNAWVKAVEEKK

SEQ ID NO: 159 - protein, 25 aa, Artificial Sequence
  Description of Artificial Sequence: Synthetic peptide
AFRQVCHTTVPWPNASLTPKWNNET

SEQ ID NO: 160 - protein, 25 aa, Artificial Sequence
  Description of Artificial Sequence: Synthetic peptide
VFNFPPNGTHSWEYWGAQLNAMKGD

SEQ ID NO: 161 - protein, 25 aa, Artificial Sequence
  Description of Artificial Sequence: Synthetic peptide
NWRSELYKYKVVKIEPLGVAPTKAK

SEQ ID NO: 162 - protein, 25 aa, Artificial Sequence
  Description of Artificial Sequence: Synthetic peptide
EKVKHTEEAKQIVQRHLVVETGTTE

SEQ ID NO: 163 - protein, 25 aa, Artificial Sequence
  Description of Artificial Sequence: Synthetic peptide
DQVESTAGSLQGQWRGAAGTAAQAA

SEQ ID NO: 164 - protein, 25 aa, Artificial Sequence
  Description of Artificial Sequence: Synthetic peptide
QELDEISTNIRQAGVQYSRADEEQQ

SEQ ID NO: 165 - protein, 25 aa, Artificial Sequence
  Description of Artificial Sequence: Synthetic peptide
FHSQPINERPKQAWCWFGGSWKEAI

SEQ ID NO: 166 - protein, 25 aa, Artificial Sequence
  Description of Artificial Sequence: Synthetic peptide
DDIDEEDDDLVGVSVRPKVPLRTMS

SEQ ID NO: 167 - protein, 25 aa, Artificial Sequence
  Description of Artificial Sequence: Synthetic peptide
PFAAAQQRGPRKPIKCWNCGKEGHS

SEQ ID NO: 168 - protein, 25 aa, Artificial Sequence
  Description of Artificial Sequence: Synthetic peptide
RRLTARGLLNMADKKETRTPKKAKA

SEQ ID NO: 169 - protein, 9 aa, Artificial Sequence
  Description of Artificial Sequence: Synthetic peptide
EGPRNQDWL

SEQ ID NO: 170 - protein, 9 aa, Artificial Sequence
  Description of Artificial Sequence: Synthetic peptide
TAPDNLGYM

SEQ ID NO: 171 - protein, 9 aa, Artificial Sequence
  Description of Artificial Sequence: Synthetic peptide
SVYDFFVWL

SEQ ID NO: 172 - protein, 9 aa, Artificial Sequence
  Description of Artificial Sequence: Synthetic peptide
MNKYAYHML

SEQ ID NO: 173 - protein, 8 aa, Artificial Sequence
  Description of Artificial Sequence: Synthetic peptide
SIIVFNLL

SEQ ID NO: 174 - protein, 9 aa, Artificial Sequence
  Description of Artificial Sequence: Synthetic peptide
ASMTNMELM

SEQ ID NO: 175 - protein, 9 aa, Artificial Sequence
  Description of Artificial Sequence: Synthetic peptide
AQLANDVVL

SEQ ID NO: 176 - protein, 9 aa, Artificial Sequence
  Description of Artificial Sequence: Synthetic peptide
LPYLGWLVF

SEQ ID NO: 177 - protein, 10 aa, Artificial Sequence
  Description of Artificial Sequence: Synthetic peptide
GYCGLRGTGV

SEQ ID NO: 178 - protein, 8 aa, Artificial Sequence
  Description of Artificial Sequence: Synthetic peptide
LSIFKHKL

SEQ ID NO: 179 - protein, 8 aa, Artificial Sequence
  Description of Artificial Sequence: Synthetic peptide
LIWIPALL

SEQ ID NO: 180 - protein, 9 aa, Artificial Sequence
  Description of Artificial Sequence: Synthetic peptide
SSGHNECPV

SEQ ID NO: 181 - protein, 9 aa, Artificial Sequence
  Description of Artificial Sequence: Synthetic peptide
GQKMNAQAI

SEQ ID NO: 182 - protein, 17 aa, Artificial Sequence
  Description of Artificial Sequence: Synthetic peptide
ISQAVHAAHAEINEAGR

SEQ ID NO: 183 - protein, 19 aa, Artificial Sequence
  Description of Artificial Sequence: Synthetic peptide
MTEQQWNFAGIEAAASAIQ

SEQ ID NO: 184 - protein, 20 aa, Artificial Sequence
  Description of Artificial Sequence: Synthetic peptide
FNNFTVSFWLRVPKVSASHL

SEQ ID NO: 185 - protein, 15 aa, Artificial Sequence
  Description of Artificial Sequence: Synthetic peptide
DGSTDYGILQINSRW

SEQ ID NO: 186 - protein, 19 aa, Artificial Sequence
  Description of Artificial Sequence: Synthetic peptide
MEVGWYRSPFSRVVHLYRN

SEQ ID NO: 187 - protein, 25 aa, Artificial Sequence
  Description of Artificial Sequence: Synthetic peptide
VSGLEQLESIINFEKLTEWTSSNVM

SEQ ID NO: 188 - protein, 25 aa, Artificial Sequence
  Description of Artificial Sequence: Synthetic peptide
ALLAVGALEGPRNQDWLGVPRQLVT

SEQ ID NO: 189 - protein, 25 aa, Artificial Sequence
  Description of Artificial Sequence: Synthetic peptide
VTNTEMFVTAPDNLGYMYEVQWPGQ

SEQ ID NO: 190 - protein, 25 aa, Artificial Sequence
  Description of Artificial Sequence: Synthetic peptide
TQPQIANCSVYDFFVWLHYYSVRDT

SEQ ID NO: 191 - protein, 25 aa, Artificial Sequence
  Description of Artificial Sequence: Synthetic peptide
LWPRVTYHSPSYAYHQFERRAKYKR

SEQ ID NO: 192 - protein, 25 aa, Artificial Sequence
  Description of Artificial Sequence: Synthetic peptide
LWPRVTYHMNKYAYHMLERRAKYKR

SEQ ID NO: 193 - protein, 25 aa, Artificial Sequence
  Description of Artificial Sequence: Synthetic peptide
GQSLVISASIIVFNLLELEGDYRDD

SEQ ID NO: 194 - protein, 25 aa, Artificial Sequence
  Description of Artificial Sequence: Synthetic peptide
GIPVHLELASMTNMELMSSIVHQQV

SEQ ID NO: 195 - protein, 25 aa, Artificial Sequence
  Description of Artificial Sequence: Synthetic peptide
RVLELFRAAQLANDVVLQIMELCGA

SEQ ID NO: 196 - protein, 25 aa, Artificial Sequence
  Description of Artificial Sequence: Synthetic peptide
HRYSLEEILPYLGWLVFAVVTTSFL

SEQ ID NO: 197 - protein, 25 aa, Artificial Sequence
  Description of Artificial Sequence: Synthetic peptide
YLSKNPDGYCGLRGTGVSCPMAIKK

SEQ ID NO: 198 - protein, 25 aa, Artificial Sequence
  Description of Artificial Sequence: Synthetic peptide
NEIPFTYEQLSIFKHKLDKTYPQGY

SEQ ID NO: 199 - protein, 25 aa, Artificial Sequence
  Description of Artificial Sequence: Synthetic peptide
SRASLLGPGFVLIWIPALLPALRLS

SEQ ID NO: 200 - protein, 25 aa, Artificial Sequence
  Description of Artificial Sequence: Synthetic peptide
NWHKGWNWSSGHNECPVGASCHPFT

SEQ ID NO: 201 - protein, 25 aa, Artificial Sequence
  Description of Artificial Sequence: Synthetic peptide
KTLLKVSKGQKMNAQAIALVACYLR

SEQ ID NO: 202 - protein, 25 aa, Artificial Sequence
  Description of Artificial Sequence: Synthetic peptide
ESLKISQAVHAAHAEINEAGREVVG

SEQ ID NO: 203 - protein, 25 aa, Artificial Sequence
  Description of Artificial Sequence: Synthetic peptide
MTEQQWNFAGIEAAASAIQGNVTSI

SEQ ID NO: 204 - protein, 25 aa, Artificial Sequence
  Description of Artificial Sequence: Synthetic peptide
DMFNNFTVSFWLRVPKVSASHLEQY

SEQ ID NO: 205 - protein, 25 aa, Artificial Sequence
  Description of Artificial Sequence: Synthetic peptide
TNRNTDGSTDYGILQINSRWWCNDG

SEQ ID NO: 206 - protein, 25 aa, Artificial Sequence
  Description of Artificial Sequence: Synthetic peptide
TGMEVGWYRSPFSRVVHLYRNGKDQ

SEQ ID NO: 207 - protein, 13 aa, Artificial Sequence
  Description of Artificial Sequence: Synthetic peptide
AKFVAAWTLKAAA

SEQ ID NO: 208 - protein, 14 aa, Artificial Sequence
  Description of Artificial Sequence: Synthetic peptide
QYIKANSKFIGITE

SEQ ID NO: 209 - protein, 9 aa, Artificial Sequence
  Description of Artificial Sequence: Synthetic peptide
DLMGYIPAV

SEQ ID NO: 210 - protein, 10 aa, Artificial Sequence
  Description of Artificial Sequence: Synthetic peptide
FLPSDFFPSV

SEQ ID NO: 211 - protein, 9 aa, Artificial Sequence
  Description of Artificial Sequence: Synthetic peptide
FLLTRILTI

SEQ ID NO: 212 - protein, 9 aa, Artificial Sequence
  Description of Artificial Sequence: Synthetic peptide
FLLSLGIHL

SEQ ID NO: 213 - protein, 9 aa, Artificial Sequence
  Description of Artificial Sequence: Synthetic peptide
ILKEPVHGV

SEQ ID NO: 214 - protein, 10 aa, Artificial Sequence
  Description of Artificial Sequence: Synthetic peptide
YMLDLQPETT

SEQ ID NO: 215 - protein, 9 aa, Artificial Sequence
  Description of Artificial Sequence: Synthetic peptide
CINGVCWTV

SEQ ID NO: 216 - protein, 10 aa, Artificial Sequence
  Description of Artificial Sequence: Synthetic peptide
YLLPRRGPRL

SEQ ID NO: 217 - protein, 9 aa, Artificial Sequence
  Description of Artificial Sequence: Synthetic peptide
FLYALALLL

SEQ ID NO: 218 - protein, 9 aa, Artificial Sequence
  Description of Artificial Sequence: Synthetic peptide
AAGIGILTV

SEQ ID NO: 219 - protein, 9 aa, Artificial Sequence
  Description of Artificial Sequence: Synthetic peptide
SLLMWITQV

SEQ ID NO: 220 - protein, 9 aa, Artificial Sequence
  Description of Artificial Sequence: Synthetic peptide
KLGGALQAK

SEQ ID NO: 221 - protein, 9 aa, Artificial Sequence
  Description of Artificial Sequence: Synthetic peptide
RLRAEAQVK

SEQ ID NO: 222 - protein, 10 aa, Artificial Sequence
  Description of Artificial Sequence: Synthetic peptide
EENLLDFVRF

SEQ ID NO: 223 - protein, 9 aa, Artificial Sequence
  Description of Artificial Sequence: Synthetic peptide
EEYLQAFTY

SEQ ID NO: 224 - protein, 9 aa, Artificial Sequence
  Description of Artificial Sequence: Synthetic peptide
DWENVSPEL

SEQ ID NO: 225 - protein, 15 aa, Artificial Sequence
  Description of Artificial Sequence: Synthetic peptide
QYIKANSKFIGITEL

What is claimed is:

1. A vector system comprising an antigen cassette,
the antigen cassette comprising:
(1) at least one antigen-encoding nucleic acid sequence associated with a tumor present within a subject comprising:
at least one antigen-encoding nucleic acid sequence, optionally the at least one antigen-encoding nucleic acid sequence comprising an MHC class I antigen-encoding nucleic acid sequence, each comprising:
a. an epitope encoding nucleic acid sequence, optionally comprising at least one alteration that makes the encoded peptide sequence distinct from the corresponding peptide sequence encoded by a wild-type nucleic acid sequence,
b. optionally a 5′ linker sequence, and
c. optionally a 3′ linker sequence;
(2) at least one promoter sequence operably linked to at least one antigen-encoding nucleic acid sequence,
(3) optionally, at least one MHC class II antigen-encoding nucleic acid sequence;
(4) optionally, at least one GPGPG linker sequence (SEQ ID NO:56);
(5) optionally, at least one polyadenylation sequence; and
the vector further comprising, optionally within the cassette, a nucleic acid sequence encoding at least one immune modulator, optionally wherein the nucleic acid sequence encoding the at least one immune modulator is transcribed on:
(1) the same transcript as the at least one antigen-encoding nucleic acid sequence with an internal ribosome entry sequence (IRES) sequence separating the sequences encoding the at least one immune modulator and the at least one antigen-encoding nucleic acid sequence, or
(2) a different transcript as the at least one antigen-encoding nucleic acid sequence, wherein at least one second promoter sequence is operably linked to the sequences encoding the at least one immune modulator.

2. A chimpanzee adenovirus vector comprising:
a. a modified ChAdV68 sequence comprising the sequence of SEQ ID NO:1 with an E1 (nt 577 to 3403) deletion and an E3 (nt 27,125-31,825) deletion;
b. a CMV promoter sequence;
c. an SV40 polyadenylation signal nucleotide sequence;
d. a nucleic acid sequence encoding an immune checkpoint inhibitor, and
e. an antigen cassette, the antigen cassette comprising:
(1) at least one antigen-encoding nucleic acid sequences derived from a tumor present within a subject, the at least one antigen-encoding nucleic acid sequence comprising:
at least 10 tumor-specific and subject-specific MHC class I antigen-encoding nucleic acid sequences linearly linked to each other and each comprising:
(A) a MHC class I epitope encoding nucleic acid sequence with at least one alteration that makes the encoded peptide sequence distinct from the corresponding peptide sequence encoded by a wild-type nucleic acid sequence, wherein the MHC I epitope encoding nucleic acid sequence encodes a MHC class I epitope 7-15 amino acids in length,
(B) a 5′ linker sequence, wherein the 5′ linker sequence encodes a native N-terminal amino acid sequence of the MHC I epitope, and wherein the 5′ linker sequence encodes a peptide that is at least 3 amino acids in length,
(C) a 3′ linker sequence, wherein the 3′ linker sequence encodes a native C-terminal acid sequence of the MHC I epitope, and wherein the 3′ linker sequence encodes a peptide that is at least 3 amino acids in length, and
wherein each of the MHC class I antigen-encoding nucleic acid sequences encodes a polypeptide that is 25 amino acids in length, and wherein each 3′ end of each MHC class I antigen-encoding nucleic acid sequence is linked to the 5′ end of the following MHC class I antigen-encoding nucleic acid sequence with the exception of the final MHC class I antigen-encoding nucleic acid sequence; and
(2) at least two MHC class II antigen-encoding nucleic acid sequences comprising:
(A) a PADRE MHC class II sequence (SEQ ID NO:48),
(B) a Tetanus toxoid MHC class II sequence (SEQ ID NO:46),
(C) a first nucleic acid sequence encoding a GPGPG amino acid linker sequence linking the PADRE MHC class II sequence and the Tetanus toxoid MHC class II sequence,
(D) a second nucleic acid sequence encoding a GPGPG amino acid linker sequence linking the 5′ end of the at least two MHC class II antigen-encoding nucleic acid sequences to the at least 10 tumor-specific and subject-specific MHC class I neoaantigen-encoding nucleic acid sequences,
(E) optionally, a third nucleic acid sequence encoding a GPGPG amino acid linker sequence at the 3′ end of the at least two MHC class II antigen-encoding nucleic acid sequences; and
wherein the antigen cassette is inserted within the E1 deletion and the CMV promoter sequence is operably linked to the antigen cassette, and wherein the nucleic acid sequence encoding the checkpoint inhibitor is transcribed:
(1) on the same transcript as the at least one antigen-encoding nucleic acid sequence with an internal ribosome entry sequence (IRES) sequence separating the sequences encoding the checkpoint inhibitor and the at least one antigen-encoding nucleic acid sequence, or
(2) on a different transcript as the at least one antigen-encoding nucleic acid sequences, optionally wherein a second CMV promoter sequence is operably linked to the sequences encoding the at least one immune modulator, or optionally wherein the at least one immune modulator is inserted within the E3 deletion.

3. The vector of claim 1, wherein an ordered sequence of each element of the vector is described in the formula, from 5′ to 3′, comprising:
Pₐ-(L5_{b}-N_{c}-L3_{d})_{X}-(G5ₑ-U_{f})_{Y}-G3_{g}-Aₕ
wherein P comprises the at least one promoter sequence operably linked to at least one of the at least one antigen-encoding nucleic acid sequences, where a=1,
N comprises one of the epitope encoding nucleic acid sequence with at least one alteration that makes the encoded peptide sequence distinct from the corresponding peptide sequence encoded by the wild-type nucleic acid sequence, where c=1,
L5 comprises the 5′ linker sequence, where b=0 or 1,
L3 comprises the 3′ linker sequence, where d=0 or 1,
G5 comprises one of the at least one nucleic acid sequences encoding a GPGPG amino acid linker, where e=0 or 1,
G3 comprises one of the at least one nucleic acid sequences encoding a GPGPG amino acid linker, where g=0 or 1,
U comprises one of the at least one MHC class II antigen-encoding nucleic acid sequence, where f=1,
A comprises the at least one polyadenylation sequence, where h=0 or 1,
X=2 to 400, where for each X the corresponding N_{c} is an epitope encoding nucleic acid sequence, optionally wherein for each X the corresponding N_{c} is a distinct MHC class I epitope encoding nucleic acid sequence, and
Y=0-2, where for each Y the corresponding U_{f} is an antigen-encoding nucleic acid sequence, optionally wherein for each Y the corresponding U_{f} is a distinct MHC class II antigen-encoding nucleic acid sequence.

4. The vector of claim 3, wherein
b=1, d=1, e=1, g=1, h=1, X=10, Y=2,
P is a CMV promoter sequence,
each N encodes a MHC class I epitope 7-15 amino acids in length,
L5 encodes a native N-terminal amino acid sequence of the MHC I epitope, and wherein the 5′ linker sequence encodes a peptide that is at least 3 amino acids in length,
L3 encodes a native C-terminal amino acid sequence of the MHC I epitope, and wherein the 3′ linker sequence encodes a peptide that is at least 3 amino acids in length,
U is each of a PADRE class II sequence and a Tetanus toxoid MHC class II sequence,
the vector comprises a modified ChAdV68 sequence comprising the sequence of SEQ ID NO:1 with an E1 (nt 577 to 3403) deletion and an E3 (nt 27,125-31,825) deletion and the neoantigen cassette is inserted within the E1 deletion, and
each of the MHC class I antigen-encoding nucleic acid sequences encodes a polypeptide that is 25 amino acids in length.

5. The vector of any of claims 1-4, wherein at least one of the antigen-encoding nucleic acid sequences encodes a polypeptide sequence or portion thereof that is presented by MHC class I on the tumor cell surface.

6. The vector of any of the above claims except claim 2 or 4, wherein each antigen-encoding nucleic acid sequence is linked directly to one another.

7. The vector of any of the above claims except claim 2 or 4, wherein at least one of the at least one antigen-encoding nucleic acid sequences is linked to a distinct antigen-encoding nucleic acid sequence with nucleic acid sequence encoding a linker.

8. The vector of claim 7, wherein the linker links two MHC class I sequences or an MHC class I sequence to an MHC class II sequence.

9. The vector of claim 8, wherein the linker is selected from the group consisting of: (1) consecutive glycine residues, at least 2, 3, 4, 5, 6, 7, 8, 9, or 10 residues in length; (2) consecutive alanine residues, at least 2, 3, 4, 5, 6, 7, 8, 9, or 10 residues in length; (3) two arginine residues (RR); (4) alanine, alanine, tyrosine (AAY); (5) a consensus sequence at least 2, 3, 4, 5, 6, 7, 8, 9, or 10 amino acid residues in length that is processed efficiently by a mammalian proteasome; and (6) one or more native sequences flanking the antigen derived from the cognate protein of origin and that is at least 2, 3, 4, 5, 6, 7, 8, 9, 10, 11, 12, 13, 14, 15, 16, 17, 18, 19, 20, or 2-20 amino acid residues in length.

10. The vector of claim 7, wherein the linker links two MHC class II sequences or an MHC class II sequence to an MHC class I sequence.

11. The vector of claim 10, wherein the linker comprises the sequence GPGPG.

12. The vector of any of the above claims except claim 2 or 4, wherein at least one of the at least one antigen-encoding nucleic acid sequences is linked, operably or directly, to a separate or contiguous sequence that enhances the expression, stability, cell trafficking, processing and presentation, and/or immunogenicity of the at least one antigen-encoding nucleic acid sequence.

13. The vector of claim 12, wherein the separate or contiguous sequence comprises at least one of: a ubiquitin sequence, a ubiquitin sequence modified to increase proteasome targeting (e.g., the ubiquitin sequence contains a Gly to Ala substitution at position 76), an immunoglobulin signal sequence (e.g., IgK), a major histocompatibility class I sequence, lysosomal-associated membrane protein (LAMP)-1, human dendritic cell lysosomal-associated membrane protein, and a major histocompatibility class II sequence; optionally wherein the ubiquitin sequence modified to increase proteasome targeting is A76.

14. The vector of any of the above claims, wherein at least one of the antigen-encoding nucleic acid sequences encodes a polypeptide sequence or portion thereof that has increased binding affinity to its corresponding MHC allele relative to the translated, corresponding wild-type nucleic acid sequence.

15. The vector of any of the above claims, wherein at least one of the antigen-encoding nucleic acid sequences encodes a polypeptide sequence or portion thereof that has increased binding stability to its corresponding MHC allele relative to the translated, corresponding wild-type nucleic acid sequence.

16. The vector of any of the above claims, wherein at least one of the antigen-encoding nucleic acid sequences encodes a polypeptide sequence or portion thereof that has an increased likelihood of presentation on its corresponding MHC allele relative to the translated, corresponding wild-type nucleic acid sequence.

17. The vector of any of the above claims, wherein the at least one alteration comprises a point mutation, a frameshift mutation, a non-frameshift mutation, a deletion mutation, an insertion mutation, a splice variant, a genomic rearrangement, or a proteasome-generated spliced antigen.

18. The vector of any of the above claims, wherein the tumor is selected from the group consisting of: lung cancer, melanoma, breast cancer, ovarian cancer, prostate cancer, kidney cancer, gastric cancer, colon cancer, testicular cancer, head and neck cancer, pancreatic cancer, brain cancer, B-cell lymphoma, acute myelogenous leukemia, chronic myelogenous leukemia, chronic lymphocytic leukemia, T cell lymphocytic leukemia, non-small cell lung cancer, and small cell lung cancer.

19. The vector of any of the above claims except claim 2 or 4, wherein the expression of each of the at least one antigen-encoding nucleic acid sequences is driven by the at least one promoter.

20. The vector of any of the above claims except claim 2 or 4, wherein the at least one antigen-encoding nucleic acid sequence comprises at least 2, 3, 4, 5, 6, 7, 8, 9, or 10 nucleic acid sequences.

21. The vector of any of the above claims except claim 2 or 4, wherein the at least one antigen-encoding nucleic acid sequence the comprises at least 11, 12, 13, 14, 15, 16, 17, 18, 19, 20 or up to 400 nucleic acid sequences.

22. The vector of any of the above claims except claim 2 or 4, wherein the at least one antigen-encoding nucleic acid sequence comprises at least 2-400 nucleic acid sequences and wherein at least two of the antigen-encoding nucleic acid sequences encode polypeptide sequences or portions thereof that are presented by MHC class I on the tumor cell surface.

23. The vector of any of the above claims except claim 2 or 4, wherein the at least one antigen-encoding nucleic acid sequence comprises at least 2-400 nucleic acid sequences and wherein, when administered to the subject and translated, at least one of the antigens are presented on antigen presenting cells resulting in an immune response targeting at least one of the antigens on the tumor cell surface.

24. The vector of any of the above claims except claim 2 or 4, wherein the at least one antigen-encoding nucleic acid sequence comprises at least 2-400 MHC class I and/or class II antigen-encoding nucleic acid sequences, wherein, when administered to the subject and translated, at least one of the MHC class I or class II antigens are presented on antigen presenting cells resulting in an immune response targeting at least one of the antigens on the tumor cell surface, and optionally wherein the expression of each of the at least 2-400 MHC class I or class II antigen-encoding nucleic acid sequences is driven by the at least one promoter.

25. The vector of any of the above claims except claim 2 or 4, wherein each MHC class I antigen-encoding nucleic acid sequence encodes a polypeptide sequence between 8 and 35 amino acids in length, optionally 9-17, 9-25, 8, 9, 10, 11, 12, 13, 14, 15, 16, 17, 18, 19, 20, 21, 22, 23, 24, 25, 26, 27, 28, 29, 30, 31, 32, 33, 34 or 35 amino acids in length.

26. The vector of any of the above claims except claim 2 or 4, wherein the at least one MHC class II antigen-encoding nucleic acid sequence is present.

27. The vector of any of the above claims except claim 2 or 4, wherein the at least one MHC class II antigen-encoding nucleic acid sequence is present and comprises at least one MHC class II antigen-encoding nucleic acid sequence that comprises at least one alteration that makes the encoded peptide sequence distinct from the corresponding peptide sequence encoded by a wild-type nucleic acid sequence.

28. The vector of any of the above claims except claim 2 or 4, wherein the at least one MHC class II antigen-encoding nucleic acid sequence is 12-20, 12, 13, 14, 15, 16, 17, 18, 19, 20, or 20-40 amino acids in length.

29. The vector of any of the above claims except claim 2 or 4, wherein the at least one MHC class II antigen-encoding nucleic acid sequence is present and comprises at least one universal MHC class II antigen-encoding nucleic acid sequence, optionally wherein the at least one universal sequence comprises at least one of Tetanus toxoid and PADRE.

30. The vector of any of the above claims except claim 2 or 4, wherein the at least one promoter sequence is inducible.

31. The vector of any of the above claims except claim 2 or 4, wherein the at least one promoter sequence is non-inducible.

32. The vector of any of the above claims except claim 2 or 4, wherein the at least one promoter sequence is a CMV, SV40, EF-1, RSV, PGK, HSA, MCK, or EBV promoter sequence.

33. The vector of any of the above claims, wherein the antigen cassette further comprises at least one poly-adenylation (polyA) sequence operably linked to at least one of the at least one antigen-encoding nucleic acid sequences, optionally wherein the polyA sequence is located 3′ of the at least one antigen-encoding nucleic acid sequence.

34. The vector of claim 33, wherein the polyA sequence comprises an or Bovine Growth Hormone (BGH) SV40 polyA sequence.

35. The vector of any of the above claims, wherein the antigen cassette further comprises at least one of: an intron sequence, a woodchuck hepatitis virus posttranscriptional regulatory element (WPRE) sequence, an internal ribosome entry sequence (IRES) sequence, a nucleotide sequence encoding a 2A self cleaving peptide sequence, a nucleotide sequence encoding a Furin cleavage site, or a sequence in the 5′ or 3′ non-coding region known to enhance the nuclear export, stability, or translation efficiency of mRNA that is operably linked to at least one of the at least one antigen-encoding nucleic acid sequences.

36. The vector of any of the above claims, wherein the antigen cassette further comprises a reporter gene, including but not limited to, green fluorescent protein (GFP), a GFP variant, secreted alkaline phosphatase, luciferase, or a luciferase variant.

37. The vector of any of the above claims, wherein the at least one immune modulator inhibits an immune checkpoint molecule.

38. The vector of claim 37, wherein the immune modulator is an anti-CTLA4 antibody or an antigen-binding fragment thereof, an anti-PD-1 antibody or an antigen-binding fragment thereof, an anti-PD-L1 antibody or an antigen-binding fragment thereof, an anti-4-1BB antibody or an antigen-binding fragment thereof, or an anti-OX-40 antibody or an antigen-binding fragment thereof.

39. The vector of claim 38, wherein the antibody or antigen-binding fragment thereof is a Fab fragment, a Fab′ fragment, a single chain Fv (scFv), a single domain antibody (sdAb) either as single specific or multiple specificities linked together (e.g., camelid antibody domains), or full-length single-chain antibody (e.g., full-length IgG with heavy and light chains linked by a flexible linker).

40. The vector of claim 38 or 39, wherein the heavy and light chain sequences of the antibody are a contiguous sequence separated by either a self-cleaving sequence such as 2A, optionally wherein the self-cleaving sequence has a Furin cleavage site sequence 5′ of the self-cleaving sequence, or an IRES sequence; or the heavy and light chain sequences of the antibody are linked by a flexible linker such as consecutive glycine residues.

41. The vector of claim 37, wherein the immune modulator is a cytokine.

42. The vector of claim 41, wherein the cytokine is at least one of IL-2, IL-7, IL-12, IL-15, or IL-21 or variants thereof of each.

43. The vector of any of the above claims except claim 2 or 4, wherein the vector is a chimpanzee adenovirus vector, optionally wherein the chimpanzee adenovirus vector is a ChAdV68 vector, or an srRNA vector, optionally wherein the srRNA vector is a Venezuelan equine encephalitis virus srRNA vector.

44. The vector of any of the above claims except claim 2 or 4, wherein the vector comprises the sequence set forth in SEQ ID NO:1.

45. The vector of any of the above claims except claim 2 or 4, wherein the vector comprises the sequence set forth in SEQ ID NO:1, except that the sequence is fully deleted or functionally deleted in at least one gene selected from the group consisting of the chimpanzee adenovirus E1A, E1B, E2A, E2B, E3, E4, L1, L2, L3, L4, and L5 genes of the sequence set forth in SEQ ID NO: 1, optionally wherein the sequence is fully deleted or functionally deleted in: (1) E1A and E1B; (2) E1A, E1B, and E3; or (3) E1A, E1B, E3, and E4 of the sequence set forth in SEQ ID NO: 1.

46. The vector of any of the above claims except claim 2 or 4, wherein the vector comprises a gene or regulatory sequence obtained from the sequence of SEQ ID NO: 1, optionally wherein the gene is selected from the group consisting of the chimpanzee adenovirus inverted terminal repeat (ITR), E1A, E1B, E2A, E2B, E3, E4, L1, L2, L3, L4, and L5 genes of the sequence set forth in SEQ ID NO: 1.

47. The vector of any of the above claims except claim 2 or 4, wherein the antigen cassette is inserted in the vector at the E1 region, E3 region, and/or any deleted AdV region that allows incorporation of the antigen cassette.

48. The vector of any of the above claims except claim 2 or 4, wherein the vector is generated from one of a first generation, a second generation, or a helper-dependent adenoviral vector.

49. The vector of any of the above claims except claim 2 or 4, wherein the vector comprises one or more deletions between base pair number 577 and 3403 or between base pair 456 and 3014, and optionally wherein the vector further comprises one or more deletions between base pair 27,125 and 31,825 or between base pair 27,816 and 31,333 of the sequence set forth in SEQ ID NO:1.

50. The vector of any of the above claims except claim 2 or 4, wherein the vector further comprises one or more deletions between base pair number 3957 and 10346, base pair number 21787 and 23370, and base pair number 33486 and 36193 of the sequence set forth in SEQ ID NO:1.

51. The vector of any of the above claims except claim 2 or 4, wherein the at least one antigen-encoding nucleic acid sequences are selected by performing the steps of:
obtaining at least one of exome, transcriptome, or whole genome tumor nucleotide sequencing data from the tumor, wherein the tumor nucleotide sequencing data is used to obtain data representing peptide sequences of each of a set of antigens;
inputting the peptide sequence of each antigen into a presentation model to generate a set of numerical likelihoods that each of the antigens is presented by one or more of the MHC alleles on the tumor cell surface of the tumor, the set of numerical likelihoods having been identified at least based on received mass spectrometry data; and
selecting a subset of the set of antigens based on the set of numerical likelihoods to generate a set of selected antigens which are used to generate the at least one antigen-encoding nucleic acid sequences.

52. The vector of claim 2, wherein each of the MHC class I epitope encoding nucleic acid sequences are selected by performing the steps of:
obtaining at least one of exome, transcriptome, or whole genome tumor nucleotide sequencing data from the tumor, wherein the tumor nucleotide sequencing data is used to obtain data representing peptide sequences of each of a set of antigens;
inputting the peptide sequence of each antigen into a presentation model to generate a set of numerical likelihoods that each of the antigens is presented by one or more of the MHC alleles on the tumor cell surface of the tumor, the set of numerical likelihoods having been identified at least based on received mass spectrometry data; and
selecting a subset of the set of antigens based on the set of numerical likelihoods to generate a set of selected antigens which are used to generate the at least two MHC class I antigen-encoding nucleic acid sequences.

53. The vector of claim 51, wherein a number of the set of selected antigens is 2-20.

54. The vector of claim 51 or 52, wherein the presentation model represents dependence between:
presence of a pair of a particular one of the MHC alleles and a particular amino acid at a particular position of a peptide sequence; and
likelihood of presentation on the tumor cell surface, by the particular one of the MHC alleles of the pair, of such a peptide sequence comprising the particular amino acid at the particular position.

55. The vector of claim 51 or 52, wherein selecting the set of selected antigens comprises selecting antigens that have an increased likelihood of being presented on the tumor cell surface relative to unselected antigens based on the presentation model.

56. The vector of claim 51 or 52, wherein selecting the set of selected antigens comprises selecting antigens that have an increased likelihood of being capable of inducing a tumor-specific immune response in the subject relative to unselected antigens based on the presentation model.

57. The vector of claim 51 or 52, wherein selecting the set of selected antigens comprises selecting antigens that have an increased likelihood of being capable of being presented to naïve T cells by professional antigen presenting cells (APCs) relative to unselected antigens based on the presentation model, optionally wherein the APC is a dendritic cell (DC).

58. The vector of claim 51 or 52, wherein selecting the set of selected antigens comprises selecting antigens that have a decreased likelihood of being subject to inhibition via central or peripheral tolerance relative to unselected antigens based on the presentation model.

59. The vector of claim 51 or 52, wherein selecting the set of selected antigens comprises selecting antigens that have a decreased likelihood of being capable of inducing an autoimmune response to normal tissue in the subject relative to unselected antigens based on the presentation model.

60. The vector of claim 51 or 52, wherein exome or transcriptome nucleotide sequencing data is obtained by performing sequencing on the tumor tissue.

61. The vector of claim 51 or 52, wherein the sequencing is next generation sequencing (NGS) or any massively parallel sequencing approach.

62. The vector of any of the above claims, wherein the antigen cassette comprises junctional epitope sequences formed by adjacent sequences in the antigen cassette.

63. The vector of claim 62, wherein at least one or each junctional epitope sequence has an affinity of greater than 500 nM for MHC.

64. The vector of claim 62 or 63, wherein each junctional epitope sequence is non-self.

65. The vector of any of the above claims, wherein the antigen cassette does not encode a non-therapeutic MHC class I or class II epitope nucleic acid sequence comprising a translated, wild-type nucleic acid sequence, wherein the non-therapeutic epitope is predicted to be displayed on an MHC allele of the subject.

66. The vector of claim 65, wherein the non-therapeutic predicted MHC class I or class II epitope sequence is a junctional epitope sequence formed by adjacent sequences in the antigen cassette.

67. The vector of claim 62 or 66, wherein the prediction in based on presentation likelihoods generated by inputting sequences of the non-therapeutic epitopes into a presentation model.

68. The vector of any one of claims 62-67, wherein an order of the at least one antigen-encoding nucleic acid sequences in the antigen cassette is determined by a series of steps comprising:
1. generating a set of candidate antigen cassette sequences corresponding to different orders of the at least one antigen-encoding nucleic acid sequences;
2. determining, for each candidate antigen cassette sequence, a presentation score based on presentation of non-therapeutic epitopes in the candidate antigen cassette sequence; and
3. selecting a candidate cassette sequence associated with a presentation score below a predetermined threshold as the antigen cassette sequence for a antigen vaccine.

69. A pharmaceutical composition comprising the vector of any of the above claims and a pharmaceutically acceptable carrier.

70. The pharmaceutical composition of claim 69, wherein the composition further comprises an adjuvant.

71. The pharmaceutical composition of claim 69 or 70, wherein the composition further comprises an immune modulator.

72. The pharmaceutical composition of claim 71, wherein the immune modulator is an anti-CTLA4 antibody or an antigen-binding fragment thereof, an anti-PD-1 antibody or an antigen-binding fragment thereof, an anti-PD-L1 antibody or an antigen-binding fragment thereof, an anti-4-1BB antibody or an antigen-binding fragment thereof, or an anti-OX-40 antibody or an antigen-binding fragment thereof.

73. An isolated nucleotide sequence comprising the antigen cassette of any of the above vector claims and a gene obtained from the sequence of SEQ ID NO: 1, optionally wherein the gene is selected from the group consisting of the chimpanzee adenovirus ITR, E1 Å, E1B, E2A, E2B, E3, E4, L1, L2, L3, L4, and L5 genes of the sequence set forth in SEQ ID NO: 1, and optionally wherein the nucleotide sequence is cDNA.

74. An isolated cell comprising the nucleotide sequence of claim 73, optionally wherein the cell is a CHO, HEK293 or variants thereof, 911, HeLa, A549, LP-293, PER.C6, or AE1-2a cell.

75. A vector comprising the nucleotide sequence of claim 73.

76. A kit comprising the vector of any of the above vector claims and instructions for use.

77. A method for treating a subject with cancer, the method comprising administering to the subject the vector of any of the above vector claims or the pharmaceutical composition of any of claims 69-70.

78. The method of claim 77, wherein the vector or composition is administered intramuscularly (IM), intradermally (ID), or subcutaneously (SC).

79. The method of claim 77 or 78, further comprising administering to the subject an immune modulator, optionally wherein the immune modulator is administered before, concurrently with, or after administration of the vector or pharmaceutical composition.

80. The method of claim 79, wherein the immune modulator is an anti-CTLA4 antibody or an antigen-binding fragment thereof, an anti-PD-1 antibody or an antigen-binding fragment thereof, an anti-PD-L1 antibody or an antigen-binding fragment thereof, an anti-4-1BB antibody or an antigen-binding fragment thereof, or an anti-OX-40 antibody or an antigen-binding fragment thereof.

81. The method of claim 79, wherein the immune modulator is administered intravenously (IV), intramuscularly (IM), intradermally (ID), or subcutaneously (SC).

82. The method of claim 81, wherein the subcutaneous administration is near the site of the vector or composition administration or in close proximity to one or more vector or composition draining lymph nodes.

83. The method of any one of claims 77-82, further comprising administering to the subject a second vaccine composition.

84. The method of claim 83, wherein the second vaccine composition is administered prior to the administration of the vector or the pharmaceutical composition of any one of claims 77-82.

85. The method of claim 83, wherein the second vaccine composition is administered subsequent to the administration of the vector or the pharmaceutical composition of any one of claims 77-82.

86. The method of claim 84 or 85, wherein the second vaccine composition is the same as the vector or the pharmaceutical composition of any one of claims 77-82.

87. The method of claim 84 or 85, wherein the second vaccine composition is different from the vector or the pharmaceutical composition of any one of claims 77-82.

88. The method of claim 87, wherein the second vaccine composition comprises a chimpanzee adenovirus vector, optionally wherein the chimpanzee adenovirus vector is a ChAdV68 vector, or an srRNA vector, optionally wherein the srRNA vector is a Venezuelan equine encephalitis virus vector, and
optionally wherein the chimpanzee adenovirus vector or the srRNA vector comprises a nucleic acid sequence encoding at least one immune modulator.

89. The method of claim 88, wherein the at least one antigen-encoding nucleic acid sequence encoded by the chimpanzee adenovirus vector or the srRNA vector is the same as the at least one antigen-encoding nucleic acid sequences of any of the above vector claims, and optionally wherein the nucleic acid sequence encoding the at least one immune modulator encoded by the chimpanzee adenovirus vector or the srRNA vector is the same as the the at least one immune modulator of any of the above claims.

90. A method of manufacturing the vector of any of the above vector claims, the method comprising:
obtaining a plasmid sequence comprising the at least one promoter sequence and the antigen cassette;
transfecting the plasmid sequence into one or more host cells; and
isolating the vector from the one or more host cells.

91. The method of manufacturing of claim, wherein isolating comprises:
lysing the one or more host cells to obtain a cell lysate comprising the vector; and
purifying the vector from the cell lysate and optionally also from media used to culture the one or more host cells.

92. The method of manufacturing of claim 90 or 91, wherein the plasmid sequence is generated using one of the following; DNA recombination or bacterial recombination or full genome DNA synthesis or full genome DNA synthesis with amplification of synthesized DNA in bacterial cells.

93. The method of manufacturing of any of claims 90-92, wherein the one or more host cells are at least one of CHO, HEK293 or variants thereof, 911, HeLa, A549, LP-293, PER.C6, and AE1-2a cells.

94. The method of manufacturing of any of claims 91-93, wherein purifying the vector from the cell lysate involves one or more of chromatographic separation, centrifugation, virus precipitation, and filtration.
